(19) United States
(12) Patent Application Publication
(10) Pub. No.: US 2002/0165180 A1
(43) Pub. Date: Nov. 7, 2002

(54) Process for identifying anti-cancer therapeutic agents using cancer gene sets

(76) Inventor: Zoe Weaver, Chevy Chase, MD (US)

Correspondence Address: CARELLA, BYRNE, BAIN, GILFILLAN,, CECCHI, STEWART & OLSTEIN, 6 Becker Farm Road, Roseland, NJ, 07068, US

(21) Appl. No.: 09/954,531

(22) Filed: Sep. 18, 2001

Related U.S. Application Data
(60) Provisional application No. 60/233,133, filed on Sep. 18, 2000.
(60) Provisional application No. 60/234,009, filed on Sep. 20, 2000.
(60) Provisional application No. 60/234,034, filed on Sep. 20, 2000.
(60) Provisional application No. 60/234,509, filed on Sep. 22, 2000.
(60) Provisional application No. 60/234,567, filed on Sep. 22, 2000.

(51) Int. Cl. A61K 38/17; A61K 48/00; C12Q 1/68

(52) U.S. Cl. 514/44; 514/12; 435/6

(57) ABSTRACT

Processes for assaying potential antitumor agents based on their modulation of the expression of specified genes, or sets, of suspected cancer cell genes, especially for breast cancer, are disclosed, along with methods for diagnosing cancerous, or potentially cancerous, conditions as a result of the expression, or patterns of expression, of such genes, or sets of genes. Also disclosed are methods for determining functionally related genes, or gene sets, as well as methods for treating cancer based on targeting expression products of such genes, or gene sets, and determining genes involved in the cancerous process.

[0001] This application claims priority of U.S. Provisional Application No. 60/233,133, filed Sep. 18, 2000; No. 60/234,009, filed Sep. 20, 2000; No. 60/234,034, filed Sep. 20, 2000; No. 60/234,509, filed Sep. 22, 2000; and No. 60/234,567, filed Sep. 22, 2000, the disclosures of all of which are hereby incorporated by reference in their entirety.

### FIELD OF THE INVENTION

[0002] The present invention relates to methods of assaying potential anti-tumor agents based on their modulation of the expression of specified sets of genes and methods for diagnosing cancerous, or potentially cancerous, conditions as a result of the patterns of expression of such genes.

### BACKGROUND OF THE INVENTION

[0003] Screening assays for novel drugs are based on the response of model cell based systems in vitro to treatment with specific compounds. Various measures of cellular response have been utilized, including the release of cytokines, alterations in cell surface markers, activation of specific enzymes, as well as alterations in ion flux and/or pH. Some such screens rely on specific genes, such as oncogenes (or gene mutations).

### BRIEF SUMMARY OF THE INVENTION

[0004] In accordance with the present invention, there are provided characteristic sets of gene sequences whose expression, or non-expression, or change in expression, either an increase or decrease thereof, are indicative of the cancerous or non-cancerous status of a given cell. More particularly, such genes whose expression is changed in cancerous, as compared to non-cancerous cells, from a specific tissue (in particular, breast) are genes that include one of the nucleotide sequences of SEQ ID NO: 1-1392, or sequences that are substantially identical to, or incorporated or related to, these sequences. Such a change in expression may be an increase or a decrease in expression or activity of the gene or gene sequences disclosed herein.

[0005] It is another object of the present invention to provide methods of using such characteristic, or signature, gene sets as a basis for assaying the potential ability of selected chemical agents to modulate upward or downward the expression of said characteristic, or signature, gene sets.

[0006] It is a further object of the present invention to provide methods of detecting the expression, or non-expression, or amount of expression, of said characteristic, or signature, gene sets, or portions thereof, as a means of determining the cancerous, or non-cancerous, status (or potential cancerous status) of selected cells as grown in culture or as maintained in situ.

[0007] It is a still further object of the present invention to provide methods for treating cancerous conditions utilizing selected chemical agents as determined from their ability to modulate (i.e., increase or decrease) the selected characteristic, or signature, gene sets as disclosed herein, where said genes include, or comprise, one of the sequences of SEQ ID NO: 1-1392, or sequences substantially identical to said sequences, or portions of said sequences.

[0008] In one aspect, the present invention relates to a process for identifying an agent that modulates the activity of a cancer-related gene comprising:

[0009] (a) contacting a compound with a cell containing a gene corresponding to (such as a gene that encodes an RNA at least 90% identical to the RNA encoded by or complementary to) a polynucleotide having a sequence selected from the group consisting of SEQ ID NO: 1-1392 and under conditions promoting the expression of said gene; and

[0010] (b) detecting a difference in expression of said gene relative to when said compound is not present

[0011] thereby identifying an agent that modulates the activity of a cancer-related gene.

[0012] The present invention also relates to a process for identifying an anti-neoplastic agent comprising contacting a cell exhibiting neoplastic activity with a compound first identified as a cancer-related gene modulator using an assay process as disclosed herein for determining gene modulating activity and detecting a decrease in said neoplastic activity after said contacting compared to when said contacting does not occur.

[0013] In a further aspect, the present invention relates to a process for identifying an anti-neoplastic or anti-tumor agent comprising administering to an animal exhibiting a cancerous condition an effective amount of an agent first identified according to a process as disclosed herein and detecting a decrease in said cancerous condition thereby identifying such an agent, said decrease including the death of the cancerous cell or cells.

[0014] The present invention also relates to a process for determining the cancerous status of a cell, comprising determining the level of expression in said cell of at least one gene that corresponds to a polynucleotide having a sequence selected from the group consisting of SEQ ID NO: 1-1392 wherein an elevated expression relative to a known non-cancerous cell when the sequence is one of SEQ ID NO: 1-597 or a reduced expression relative to a known non-cancerous cell when the sequence is one of SEQ ID NO: 598-1392 indicates a cancerous state or potentially cancerous state. Such sequence identity may include 100 percent identical as defined herein and any number of such genes may be used.

[0015] In an additional aspect, the present invention relates to a process for determining a cancer initiating or facilitating gene comprising contacting a cell expressing a test gene (i.e., a gene whose status as a cancer initiating or facilitating gene is to be determined) with an agent that decreases the expression of a gene that encodes an RNA at least 95% identical to an RNA encoded by (i.e., a gene corresponding to) a polynucleotide having a sequence selected from the group consisting of SEQ ID NO: 1-597 and detecting a decrease in expression of said test gene compared to when said agent is not present, thereby identifying said test gene as being a cancer initiating or facilitating gene. Such genes may, of course, be oncogenes and said decrease in expression may be due to a decrease in copy number of said gene in said cell or a cell derived from said cell, such as where copy number is reduced in the cells formed by replication of such cells.

[0016] The present invention also relates to a process for determining a cancer suppressor gene comprising contacting a cell expressing a test gene (i.e., a gene whose status as a cancer suppressor gene is to be determined) with an agent that increases the expression of a gene that corresponds to (i.e., encodes an RNA at least 90 or 95% identical to an RNA encoded by or complementary to) a polynucleotide having a sequence selected from the group consisting of SEQ ID NO: 598-1392 and detecting an increase in expression of said test gene compared to when said agent is not present, thereby identifying said test gene as being a cancer suppressor gene. The sequence identity may include identical sequences, as defined herein, and such a process includes embodiments wherein the increase in expression is due to an increase in copy number of the gene in said cell or a cell derived from said cell, such as following cellular replication.

[0017] In another aspect, the present invention relates to a process for treating cancer comprising contacting a cancerous cell with an agent having activity against an expression product encoded by a gene sequence selected from the group consisting of SEQ ID NO: 1-597. Such a process includes an embodiment wherein the cancerous cell is contacted in vivo. The agent may include an antibody.

[0018] The present invention also relates to a method for producing a product comprising identifying an agent according to the assay processes of the invention wherein said product is the data collected with respect to said agent as a result of said process and wherein said data is sufficient to convey the chemical structure and/or properties of said agent.

[0019] The present invention further relates to a process for treating a cancerous condition in an animal afflicted therewith comprising administering to said animal a therapeutically effective amount of an agent first identified as having anti-neoplastic activity using one or more of the processes of the invention.

[0020] In a further aspect, the present invention relates to a process for protecting an animal against cancer comprising administering to an animal at risk of developing cancer a therapeutically effective amount of an agent first identified as having anti-neoplastic activity using one or more of the processes disclosed herein.

### DETAILED SUMMARY OF THE INVENTION

[0021] The present invention relates to methods of assaying for potential antitumor agents based on their modulation of the expression of specified sets of genes and methods for diagnosing cancerous, or potentially cancerous, conditions as a result of the patterns of expression of such gene sets and for determining cancer-inducing or regulating genes, and gene sets, based on common expression or regulation of such genes, or gene sets.

[0022] In accordance with the present invention, model cellular systems using cell lines, primary cells, or tissue samples are maintained in growth medium and may be treated with compounds that may be at a single concentration or at a range of concentrations. At specific times after treatment, cellular RNAs are isolated from the treated cells, primary cells or tumors, which RNAs are indicative of expression of selected genes. The cellular RNA is then divided and subjected to analysis that detects the presence and/or quantity of specific RNA transcripts, which transcripts may then be amplified for detection purposes using standard methodologies, such as, for example, reverse transcriptase polymerase chain reaction (RT-PCR), etc. The presence or absence, or levels, of specific RNA transcripts are determined from these measurements and a metric derived for the type and degree of response of the sample to the treated compound compared to control samples.

[0023] Also in accordance with the present invention, there are disclosed herein characteristic, or signature, sets of genes and gene sequences whose expression is, or can be, as a result of the methods of the present invention, linked to, or used to characterize, the cancerous, or non-cancerous, status of the cells, or tissues, to be tested, especially tissues derived from breast (i.e., cancer-related genes and gene sequences). Thus, the methods of the present invention identify novel anti-neoplastic agents based on their alteration of expression of small sets of characteristic, or indicator, or signature genes in specific model systems. The methods of the invention may therefore be used with a variety of cell lines or with primary samples from tumors maintained in vitro under suitable culture conditions for varying periods of time, or in situ in suitable animal models.

[0024] More particularly, certain genes have been identified that are expressed at levels in cancer cells that are different than the expression levels in non-cancer cells. In one instance, the identified genes are expressed at higher levels in cancer cells than in normal cells. In another instance, the identified genes are expressed at lower levels in cancer cells as compared to normal cells.

[0025] In accordance with the foregoing, the present invention relates to a process for determining the cancerous status of a cell, comprising determining the level of expression in said cell of at least one gene that corresponds to (i.e., encodes an RNA at least 95% identical to the RNA encoded by or complementary to) a polynucleotide having a sequence selected from the group consisting of SEQ ID NO: 1-1392 wherein an elevated expression relative to a known non-cancerous cell when the sequence is one of SEQ ID NO: 1-597 or a reduced expression relative to a known non-cancerous cell when the sequence is one of SEQ ID NO: 598-1392 indicates a cancerous state or potentially cancerous state. Such sequence identity may include 100 percent identical as defined herein and any number of such genes may be used.

[0026] Thus, the present invention also relates to a process for identifying an anti-neoplastic agent comprising contacting a cell exhibiting neoplastic activity with a compound first identified as a cancer-related gene modulator using an assay process as disclosed herein for determining gene modulating activity and detecting a decrease in said neoplastic activity after said contacting compared to when said contacting does not occur (i.e., comparing expression when said agent is present versus when said agent is not present).

[0027] In a further aspect, the present invention relates to a process for identifying an anti-neoplastic agent comprising administering to an animal exhibiting a cancerous condition an effective amount of an agent first identified according to a process as disclosed herein and detecting a decrease in said cancerous condition thereby identifying such an agent.

[0028] It should be kept in mind that the anti-tumor or anti-neoplastic agents identified by the processes of the invention include both novel agents whose structure and anti-tumor activity were not previously known prior to identification of their activity by the processes herein as well as non-novel agents, whose structure was known but whose therapeutic value as anti-tumor agents was not appreciated prior to identification by the assay processes of the invention.

[0029] In accordance with the foregoing, the present invention relates to a process for screening for an anti-neoplastic agent comprising the steps of:

[0030] (a) contacting a compound with a cell containing a polynucleotide comprising a nucleotide sequence selected from the group consisting of SEQ ID NO: 1-1392, or a sequence at least 95% identical thereto, under conditions wherein said polynucleotide is being expressed, and

[0031] (b) determining a change in expression of at least one of said polynucleotides,

[0032] wherein a change in expression is indicative of anti-neoplastic activity.

[0033] In particular embodiments, such change in expression may be an increase or a decrease in expression or activity.

[0034] More particularly, the present invention relates to a process for screening for an anti-neoplastic agent comprising the steps of:

[0035] (a) exposing a known cancerous cell to a chemical agent to be tested for antineoplastic activity;

[0036] (b) allowing said chemical agent to modulate the activity of one or more genes present in said cell wherein said genes include or comprise one of the sequences selected from the group consisting of the sequences of SEQ ID NO: 1-1392, sequences substantially identical to said sequences, or the complements of any of the foregoing;

[0037] (c) determining the expression of one or more genes of step (b);

[0038] (d) comparing the expression of said genes in the presence or absence of exposure to said chemical agent;

[0039] wherein a difference in expression is indicative of the ability of anti-neoplastic activity.

[0040] Thus, in one aspect, the present invention relates to a process for identifying an agent that modulates the activity of a cancer-related gene comprising:

[0041] (a) contacting a compound with a cell containing a gene that encodes an RNA at least 95% identical to the RNA encoded by a polynucleotide having a sequence selected from the group consisting of SEQ ID NO: 1-1392 and under conditions promoting the expression of said gene; and

[0042] (b) detecting a difference in expression of said gene relative to when said compound is not present thereby identifying an agent that modulates the activity of a cancer-related gene.

[0043] Such sequence identity includes embodiments wherein the RNAs are at least 97 or 98% identical in sequence and include cases where the sequence is the same, thus where a gene encodes an RNA with the same nucleotide sequence as an RNA encoded by one of the sequences of SEQ ID NO: 1-1392.

[0044] In one embodiment of such processes, the sequence is selected from SEQ ID NO: 1-597 and said difference in expression is a decrease in expression. Here, the gene used encodes an RNA like that encoded by one of the sequences found to be expressed at an elevated level in breast cancer cells. In another such embodiment, the sequence is selected from SEQ ID NO: 598-1392 and said difference in expression is an increase in expression. The latter sequences encode RNAs found to be expressed at higher levels in normal cells as opposed to cancer cells.

[0045] In specific embodiments of the present invention, said chemical agent to be tested modulates the expression of more than one said gene, especially where it modulates at least two said genes, more especially where at least 3, or at least 5 of said genes, or even 10 or more of said genes in said signature set, are modulated. In a preferred embodiment, this may include more than 10 (such as 20, 50 or even 100) or even all of said genes are modulated.

[0046] In one embodiment of the present invention, said gene modulation is downward modulation, so that, as a result of exposure to the chemical agent to be tested, one or more genes of the cancerous cell will be expressed at a lower level (or not expressed at all) when exposed to the agent as compared to the expression when not exposed to the agent (i.e., when said agent is not present).

[0047] In a preferred embodiment a selected set of said genes are expressed in the reference cell but not expressed in the cell to be tested as a result of the contacting or exposure of the test cell with the chemical agent. Thus, where said chemical agent causes the gene, or genes, of the tested cell to be expressed at a lower level than the same genes of the reference cell, this is indicative of downward modulation and indicates that the chemical agent to be tested has anti-neoplastic activity (or activity in reducing expression of such cancer-related genes).

[0048] In a separate embodiment, exposure of said cells to be tested to the chemical agent, especially one suspected of having anti-neoplastic activity, may result in upward modulation of said genes of the cell to be tested. Such upward modulation is interpreted as meaning that said genes are expressed where previously not expressed, or else are expressed in greater quantities, or at higher levels, when exposed to the agent as compared to non-exposure to the agent.

[0049] Such upward modulation may be taken as indicative of anti-neoplastic activity by the tested chemical agent(s) of the gene, or genes, so modulated, resulting in lower neoplastic activity on the part of such cells, such as where increased expression of the gene, or genes, results in decreased growth and/or increased differentiation of said cells away from the cancerous state.

[0050] The genes useful in the assay processes include, respectively, as a part thereof at least one of the sequences selected from the group consisting of the sequences of SEQ ID NO: 1-1392, or sequences substantially identical thereto. Such sequences also include sequences complementary to any of the sequences disclosed herein.

[0051] The genes identified by the present disclosure are considered “cancer-related” genes, as this term is used herein, and includes genes expressed at higher levels (due, for example, to elevated rates of expression, elevated extent of expression or increased copy number) in cancer cells relative to expression of these genes in normal (i.e., non-cancerous) cells where said cancerous state or status of test cells or tissues has been determined by methods known in the art, such as by reverse transcriptase polymerase chain reaction (RT-PCR) as described in the Example below. In specific embodiments, this relates to the genes whose sequences correspond to the sequences of SEQ ID NO: 1-597. Also specifically contemplated are genes whose expression is higher in normal as opposed to known cancer cells (as determined by other means, such as uncontrolled growth, change in antigenic surface proteins, genetic mutation, and the like) such that the decreased expression in cancer cells may be indicative or, or contributory to, the realization of the cancerous state. In specific embodiments thereof, this relates to the genes whose sequences correspond to the sequences of SEQ ID NO: 598-1392 disclosed herein. As used herein, the term “correspond” means that the gene has the indicated nucleotide sequence or that it encodes substantially the same RNA as would be encoded by the indicated sequence, the term “substantially” meaning about at least 90% identical as defined elsewhere herein.

[0052] The sequences disclosed herein may be genomic in nature and thus represent the sequence of an actual gene, such as a human gene, or may be a cDNA sequence derived from a messenger RNA (mRNA) and thus represent contiguous exonic sequences derived from a corresponding genomic sequence. As described in the Example, the expression of these cancer-related genes is determined from the relative expression levels of the RNA complement of a cancerous cell relative to a normal (i.e., non-cancerous) cell. Because of the processing that may take place in transforming the initial RNA transcript into the final mRNA, the sequences disclosed herein may represent less than the full genomic sequence. They may also represent sequences derived from ribosomal and transfer RNAs. Consequently, the genes present in the cell (and representing the genomic sequences) and the sequences disclosed herein, which are mostly cDNA sequences, may be identical or may be such that the cDNAs contain less than the full genomic sequence. Such genes and cDNA sequences are still considered corresponding sequences because they both encode similar RNA sequences. Thus, by way of non-limiting example only, a gene that encodes an RNA transcript, which is then processed into a shorter mRNA, is deemed to encode both such RNAs and therefore encodes an RNA complementary to (using the usual Watson-Crick complementarity rules), or that would otherwise be encoded by, a cDNA (for example, a sequence as disclosed herein). Thus, the sequences disclosed herein correspond to genes contained in the cancerous or normal cells used to determine relative levels of expression because they represent the same sequences or are complementary to RNAs encoded by these genes. Such genes are also deemed to include different alleles that may occur in the cells used in the processes of the invention.

[0053] The genes of the invention correspond to a polynucleotide having a sequence of SEQ ID NO: 1-1392 if the gene encodes an RNA (processed or unprocessed) that is at least 90% identical, preferably at least 95% identical, most preferably at least 98% identical to, and especially identical to, an RNA that would be encoded by, or be complementary to, such as by hybridization with, a polynucleotide having the indicated sequence. In addition, genes including sequences at least 90% identical to a sequence selected from SEQ ID NO: 1-1392, preferably at least about 95% identical to such a sequence, more preferably at least about 98% identical to such sequence and most preferably comprising such sequence are specifically contemplated by all of the processes of the present invention as being genes that correspond to these sequences. In addition, sequences encoding the same proteins as any of these sequences, regardless of the percent identity of such sequences, are also specifically contemplated by any of the methods of the present invention that rely on any or all of said sequences, regardless of how they are otherwise described or limited. Thus, any such sequences are available for use in carrying out any of the methods disclosed according to the invention. Such sequences also include any open reading frames, as defined herein, present within any of the sequences of SEQ ID NO: 1-1392.

[0054] Further in accordance with the present invention, the term “percent identity” or “percent identical,” when referring to a sequence, means that a sequence is compared to a claimed or described sequence after alignment of the sequence to be compared (the “Compared Sequence”) with the described or claimed sequence (the “Reference Sequence”). The Percent Identity is then determined according to the following formula:

Percent Identity=100[1−(C/R)]

[0055] wherein C is the number of differences between the Reference Sequence and the Compared Sequence over the length of alignment between the Reference Sequence and the Compared Sequence wherein (i) each base or amino acid in the Reference Sequence that does not have a corresponding aligned base or amino acid in the Compared Sequence and (ii) each gap in the Reference Sequence and (iii) each aligned base or amino acid in the Reference Sequence that is different from an aligned base or amino acid in the Compared Sequence, constitutes a difference; and R is the number of bases or amino acids in the Reference Sequence over the length of the alignment with the Compared Sequence with any gap created in the Reference Sequence also being counted as a base or amino acid.

[0056] If an alignment exists between the Compared Sequence and the Reference Sequence for which the percent identity as calculated above is about equal to or greater than a specified minimum Percent Identity then the Compared Sequence has the specified minimum percent identity to the Reference Sequence even though alignments may exist in which the hereinabove calculated Percent Identity is less than the specified Percent Identity.

[0057] As used herein, the terms “portion,” “segment,” and “fragment,” when used in relation to polypeptides, refer to a continuous sequence of nucleotide residues, sequence forms a subset of a larger sequence. Such terms include the products produced by treatment of said polynucleotides with any of the common endonucleases, or any stretch of polynucleotides that could be synthetically synthesized. These may include exonic and intronic sequences of the corresponding genes.

[0058] As used herein and except as noted otherwise, all terms are defined as given below.

[0059] In accordance with the present invention, the term “DNA segment” or “DNA sequence” refers to a DNA polymer, in the form of a separate fragment or as a component of a larger DNA construct, which has been derived from DNA isolated at least once in substantially pure form, i.e., free of contaminating endogenous materials and in a quantity or concentration enabling identification, manipulation, and recovery of the segment and its component nucleotide sequences by standard biochemical methods, for example, using a cloning vector. Such segments are provided in the form of an open reading frame uninterrupted by internal nontranslated sequences, or introns, which are typically present in eukaryotic genes. Sequences of non-translated DNA may be present downstream from the open reading frame, where the same do not interfere with manipulation or expression of the coding regions.

[0060] The term “coding region” refers to that portion of a gene which either naturally or normally codes for the expression product of that gene in its natural genomic environment, i.e., the region coding in vivo for the native expression product of the gene. The coding region can be from a normal, mutated or altered gene, or can even be from a DNA sequence, or gene, wholly synthesized in the laboratory using methods well known to those of skill in the art of DNA synthesis.

[0061] In accordance with the present invention, the term “nucleotide sequence” refers to a heteropolymer of deoxyribonucleotides. Generally, DNA segments encoding the proteins provided by this invention are assembled from cDNA fragments and short oligonucleotide linkers, or from a series of oligonucleotides, to provide a synthetic gene which is capable of being expressed in a recombinant transcriptional unit comprising regulatory elements derived from a microbial or viral operon.

[0062] The term “expression product” means that polypeptide or protein that is the natural translation product of the gene and any nucleic acid sequences coding equivalents resulting from genetic code degeneracy and thus coding for the same amino acid(s).

[0063] The term “fragment,” when referring to a coding sequence, means a portion of DNA comprising less than the complete coding region whose expression product retains essentially the same biological function or activity as the expression product of the complete coding region.

[0064] The term “primer” means a short nucleic acid sequence that is paired with one strand of DNA and provides a free 3′-OH end at which a DNA polymerase starts synthesis of a deoxyribonucleotide chain. These include PCR primers.

[0065] The term “promoter” means a region of DNA involved in binding of RNA polymerase to initiate transcription. The term “enhancer” refers to a region of DNA that, when present and active, has the effect of increasing expression of a different DNA sequence that is being expressed, thereby increasing the amount of expression product formed from said different DNA sequence.

[0066] The term “open reading frame (ORF)” means a series of triplets coding for amino acids without any termination codons and is a sequence (potentially) translatable into protein.

[0067] As used herein, reference to a DNA sequence includes both single stranded and double stranded DNA. Thus, the specific sequence, unless the context indicates otherwise, refers to the single strand DNA of such sequence, the duplex of such sequence with its complement (double stranded DNA) and the complement of such sequence.

[0068] In carrying out the assays of the invention, relative antineoplastic activity may be ascertained by the extent to which a given chemical agent modulates the expression of genes present in a cancerous cell. Thus, a first chemical agent that modulates the expression of a gene associated with the cancerous state (i.e., a gene that includes one of the sequences disclosed herein and present in cancerous cells) to a larger degree than a second chemical agent tested by the assays of the invention is thereby deemed to have higher, or more desirable, or more advantageous, anti-neoplastic activity than said second chemical agent. Alternatively, where first and second chemical agents modulate expression of more than one of said genes, but where the second modulates expression of, for example, five said genes, whereas the first modulates expression of only three of said genes, especially where the three form a subset of the five, then the second chemical agent is deemed a more potent anti-neoplastic agent than the first. Such anti-neoplastic activity, as determined using the assays of the present invention, may necessarily include combinations of the foregoing possibilities, which are in no way to be considered limiting.

[0069] In utilizing these gene sequences for the assays according to the invention, the genes whose activity is to be determined with and without the presence of the compound to be evaluated for antitumor activity may be any one, or several, or any combination of the gene sequences disclosed herein as SEQ ID NO: 1-1392. However, how the gene sequences are employed in such assays depends on the pattern of gene expression disclosed for the signature sets. For example, a sequence that is expressed in cancerous cells but not in normal cells will identify a potential anticancer agent by that agent's ability to decrease expression of the sequence, or sequences, in tumor cells. Conversely, a sequence, or sequences, expressed in normal but not tumor cells will identify a potential antitumor agent by its ability to increase expression of those genes in the tumor cells. The same relationship holds true where the sequences are expressed in both cancer and normal cells but are expressed at a higher level in one than in the other, and vice versa. Based on the expression patterns disclosed for the gene sequences and signature sets disclosed herein, it should be readily apparent to those skilled in the art how to conduct assays for potential antitumor agents using the signature gene sets. The same holds true where the sequences, or signature gene sets, are utilized to determine the cancerous state of a cell or use of an agent to treat a cancerous condition.

[0070] Thus, in one aspect, the present invention relates to a process for screening for an anti-neoplastic agent comprising the steps of (a) exposing cells to a chemical agent to be tested for antineoplastic activity, and (b) determining a change in expression of at least one gene of a signature gene set, or a sequence that is at least 95% identical thereto, wherein a change in expression is indicative of anti-neoplastic activity. Such change in expression is intended to mean a change that includes any activity of the gene, and may be an increase or decrease thereof. In addition, such change in activity may be a change in expression or other activity of at least 1 such gene, such as 5 or 10, or more of the genes of a signature set, even as many as half of such genes or even of all of the genes of a particular gene set.

[0071] The gene expression to be measured is commonly assayed using RNA expression as an indicator. Thus, the greater the level of RNA (such as a messenger RNA) detected the higher the level of expression of the corresponding gene. Thus, gene expression, either absolute or relative, such as where the expression of several different genes are being quantitatively evaluated and compared, for example, where chemical agents modulate the expression of more than one gene, such as a set of 3, 4, 5, or more genes, is determined by the relative expression of the RNAs encoded by such genes.

[0072] RNA may be isolated from samples in a variety of ways, including lysis and denaturation with a phenolic solution containing a chaotropic agent (e.g., triazol) followed by isopropanol precipitation, ethanol wash, and resuspension in aqueous solution; or lysis and denaturation followed by isolation on solid support, such as a Qiagen resin and reconstitution in aqueous solution; or lysis and denaturation in non-phenolic, aqueous solutions followed by enzymatic conversion of RNA to DNA template copies.

[0073] Normally, prior to applying the processes of the invention, steady state RNA expression levels for the genes, and sets of genes, disclosed herein will have been obtained. It is the steady state level of such expression that is affected by potential anti-neoplastic agents as determined herein. Such steady state levels of expression are easily determined by any methods that are sensitive, specific and accurate. Such methods include, but are in no way limited to, real time quantitative polymerase chain reaction (PCR), for example, using a Perkin-Elmer 7700 sequence detection system with gene specific primer probe combinations as designed using any of several commercially available software packages, such as Primer Express software, solid support based hybridization array technology using appropriate internal controls for quantitation, including filter, bead, or microchip based arrays, solid support based hybridization arrays using, for example, chemiluminescent, fluorescent, or electrochemical reaction based detection systems.

[0074] In one embodiment of the present invention, a set of genes useful in evaluating, or screening, or otherwise assaying, one or more chemical agents for anti-neoplastic activity in the assays disclosed herein will have already been shown to have differences in the ratios of steady state RNA levels in cancer cells, or tissues, relative to normal, or non-tumorous cells or tissues, or will have exhibited differences in the expression ratios in tumor samples compared to normal samples between genes in a given subset of the set of genes disclosed herein, or will have gene expression that has increased from undetectable levels to detectable levels, or vice versa, as the case may be, especially where sensitive detection methods are employed, or conversely will have decreased from detectable levels to undetectable levels with such procedures, especially sensitive procedures.

[0075] The genes, and gene sequences, useful in practicing the methods of the present invention are genes that are found to be selectively expressed in, or not expressed in, cancer cells as compared to non-cancer cells, or in which expression is down-regulated or up-regulated, as the case may be, in cancerous cells as compared to non-cancerous cells. Thus, these may include genes, or sets of genes, expressed in cancer cells but absent from, or inactive in, non-cancerous cells, or may include genes, or sets of genes, expressed in non-cancerous cells, but not expressed in cancer cells. Alternatively, the genes useful in practicing the present invention may be more expressed, or less expressed, in a cancerous cell relative to a non-cancerous cell. Such genes are generally those comprising the sequences of SEQ ID NO: 1-1392, with SEQ ID NO: 1-597 exhibiting elevated expression in cancer cells related to normal cells and vice versa for SEQ ID NO: 598-1392.

[0076] In accordance with the foregoing, the present invention further relates to a process for determining the cancerous status of a test cell, comprising determining expression in said test cell of at least one gene that includes one of the nucleotide sequences selected from the sequences of SEQ ID NO: 1-1392, or a nucleotide sequence that is at least 95% identical thereto, and then comparing said expression to expression of said at least one gene in at least one cell known to be non-cancerous whereby a difference in said expression indicates that said cell is cancerous.

[0077] In a particular embodiment, the present invention is directed to a process for determining the cancerous status of a cell to be tested, comprising determining the presence in said cell of at least one gene that includes one of the nucleotide sequences selected from the sequences of SEQ ID NO: 1-1392, including sequences having substantial identity homologous to said sequences, or characteristic fragments thereof, or the complements of any of the foregoing and then comparing the pattern of said gene presence and/or absence with that found for a cell known, or believed, to be non-cancerous, or normal, at least with respect to its genetic complement.

[0078] With respect to genes that include at least one of the sequences of SEQ ID NO: 1-597, up regulation of expression in cancer cells (as compared to non-cancer cells, which may lack said genes, or said gene expression, altogether) is indicative of a cancerous, or potentially cancerous, condition.

[0079] In specific embodiments, the present invention relates to embodiments wherein the genetic pattern is the modulation of expression of more than one gene, preferably 3, 4, or 5 genes, and even includes patterns where there is a modulation of expression of as many as 10, or more, genes. Thus, where a genetic pattern is the modulation of expression of 5 genes in a cancerous cell as compared to a non-cancerous cell from the same tissue type, such as a cancerous breast cell, versus a non-cancerous cell of breast, such a pattern indicates a likelihood that such genes (i.e., the modulation of expression of those genes) is an indicator of cancerous status and thereby provides a means of diagnosing a cancerous, or potentially cancerous, status. The absence of a specific set of genes from cancerous cells where said genes are present in otherwise normal cells, especially those of a similar type, is also indicative of a correlation with the cancerous state and thus can likewise be used as a means of diagnosing the cancerous state in other cells suspected of being cancerous.

[0080] In a particular embodiment, the gene sequences as disclosed herein are indicative of the cancerous or normal state of breast tissues. Thus, as disclosed herein, these would include SEQ ID NO: 1-1392, wherein SEQ ID NO: 1-188 represent genes expressed in infiltrating ductal carcinoma of the breast that are not expressed at detectable levels in normal breast, wherein SEQ ID NO: 189-392 represent genes expressed in breast carcinoma that are not expressed at detectable levels in normal breast, wherein SEQ ID NO: 393-597 represent genes expressed in infiltrating lobular carcinoma of the breast that are not expressed at detectable levels in normal breast, wherein SEQ ID NO: 598-1000 represent genes expressed in normal breast that are absent or not expressed in infiltrating ductal carcinoma of the breast, and wherein SEQ ID NO: 1001-1392 represent genes expressed in normal breast cells but absent or not expressed in infiltrating lobular carcinoma of the breast.

[0081] The gene patterns indicative of a cancerous state need not be characteristic of every cell found to be cancerous. Thus, the methods disclosed herein are useful for detecting the presence of a cancerous condition within a tissue where less than all cells exhibit the complete pattern. For example, a set of selected genes, comprising sequences homologous under stringent conditions, or at least 90%, preferably 95%, identical to at least one of the sequences of SEQ ID NO: 1-1597, and wherein the signature set is comprised of genes expressed and/or up-regulated in cancer cells relative to normal cells, as disclosed above for the signature gene sets used for practicing the invention, may be found, using appropriate probes, either DNA or RNA, to be present in as little as 60% of cells derived from a sample of tumorous, or malignant, tissue while being absent from as much as 60% of cells derived from corresponding non-cancerous, or otherwise normal, tissue (and thus being present in as much as 40% of such normal tissue cells). In a preferred embodiment, such gene pattern is found to be present in at least 70% of cells drawn from a cancerous tissue and absent from at least 70% of a corresponding normal, non-cancerous, tissue sample. In an especially preferred embodiment, such gene pattern is found to be present in at least 80% of cells drawn from a cancerous tissue and absent from at least 80% of a corresponding normal, non-cancerous, tissue sample. In a most preferred embodiment, such gene pattern is found to be present in at least 90% of cells drawn from a cancerous tissue and absent from at least 90% of a corresponding normal, non-cancerous, tissue sample. In an additional embodiment, such gene pattern is found to be present in at least 100% of cells drawn from a cancerous tissue and absent from at least 100% of a corresponding normal, non-cancerous, tissue sample, although the latter embodiment may represent a rare occurrence.

[0082] Conversely, where the signature set (such as SEQ ID NO: 598-1392) is expressed or up-regulated in normal cells versus cancerous cells, as disclosed herein, expression in the normal cells but not in suspected cancerous cells may confirm a cancerous state in the suspected cancerous sample. The same is true for assays disclosed herein for potential antitumor agents.

[0083] Although the presence or absence of expression of one or more selected gene sequences may be indicative of a cancerous status for a given cell, the mere presence or absence of such a gene pattern may not alone be sufficient to achieve a malignant condition and thus the level of expression of such gene pattern may also be a significant factor in determining the attainment of a cancerous state. While a pattern of gene expression may be present in both cancerous and non-cancerous cells, the relative level of expression, as determined by any of the methods disclosed herein, all of which are well known in the art, may differ between the cancerous versus the non-cancerous cells. Thus, it becomes essential to also determine the level of expression of one or more of said genes as a separate means of diagnosing the presence of a cancerous status for a given cell, groups of cells, or tissues, either in culture or in situ.

[0084] In accordance with the invention disclosed herein, a determination of an anticancer agent using the signature gene sets for breast described herein is based on patterns of modulation of such genes so that increase or decrease in expression of a gene due to the presence of such a potential agent may or may not be meaningful. Thus, the more genes in a gene set that are affected by said agent the more likely said agent is an effective therapeutic agent.

[0085] In addition, different agents may have different abilities to affect the genes of a signature gene set. For example, if a potential therapeutic agent, say, agent A, causes a gene or group of genes of a characteristic or signature gene set, or even all of the genes of said gene set, to exhibit decreased expression, such as where a lower amount of mRNA is expressed from said gene(s), or less protein is produced from said mRNA, but a second potential agent, say, agent B, while modulating the activity of the same or related genes causes said expression to be reduced to half, such as where only half as much mRNA is transcribed or only half as much protein is translated from said mRNA as for agent A, then agent B is considered to have twice as much therapeutic potential as agent A.

[0086] Such modulation or change of activity as determined using the assays disclosed herein may include either an increase or a decrease in activity of said genes or gene sequences. Thus, where a gene is expressed in cancer cells but not in normal cells, or is up-regulated in cancer cells relative to normal cells, of the same organ or tissue type, an agent that down-regulates said gene or genes, or gene sequences, or prevents their expression entirely, is considered a potential antitumor agent within the present disclosure. Conversely, where an agent causes expression of a gene or genes, or gene sequences, expressed in normal cells but not in cancer cells, or where said agent up-regulates a gene or genes, or gene sequences, that are expressed in normal cells but not in cancer cells, or are up-regulated in normal cells but not in cancer cells, of the same organ or tissue type, said agent is considered to be a potential antitumor agent within the present disclosure.

[0087] The present invention also relates to a process that comprises a method for producing a product comprising identifying an agent according to one of the disclosed processes for identifying such an agent (such as the anti-neoplastic agents identified according to the assay procedures disclosed herein) wherein said product is the data collected with respect to said agent as a result of said identification process, or assay, and wherein said data is sufficient to convey the chemical character and/or structure and/or properties of said agent. For example, the present invention specifically contemplates a situation whereby a user of an assay of the invention may use the assay to screen for compounds having the desired enzyme modulating activity and, having identified the compound, then conveys that information (i.e., information as to structure, dosage, etc) to another user who then utilizes the information to reproduce the agent and administer it for therapeutic or research purposes according to the invention. For example, the user of the assay (user 1) may screen a number of test compounds without knowing the structure or identity of the compounds (such as where a number of code numbers are used the first user is simply given samples labeled with said code numbers) and, after performing the screening process, using one or more assay processes of the present invention, then imparts to a second user (user 2), verbally or in writing or some equivalent fashion, sufficient information to identify the compounds having a particular modulating activity (for example, the code number with the corresponding results). This transmission of information from user 1 to user 2 is specifically contemplated by the present invention.

[0088] In accordance with the foregoing, the present invention further relates to a process for determining the cancerous status of a cell to be tested, comprising determining the level of expression in said cell of at least one gene that includes one of the nucleotide sequences selected from the sequences of SEQ ID NO: 1-1392, including sequences substantially identical to said sequences, or characteristic fragments thereof, or the complements of any of the foregoing and then comparing said expression to that of a cell known to be non-cancerous whereby the difference in said expression indicates that said cell to be tested is cancerous.

[0089] In specific embodiments of the present invention, said expression is determined for more than one of said genes, such as 2, 3, 4, 5, or more such genes, considered as a set, and even as many as a set of 10 such genes. A set of genes, for example, 5 such genes, may be found to be expressed at certain levels in cancer cells but are found to be expressed at lower levels (or not expressed at all) in non-cancerous, or normal, cells. Conversely, a set of, for example, 5 such genes may be found to be expressed in normal (i.e., non-cancerous) cells but expressed at lower levels (or not expressed at all) in cancer cells. Thus, by determining the set or pattern of genes expressed in cancer cells but expressed at lower levels (or not at all) in non-cancer, or vice versa, a method is achieved for diagnosing cancerous conditions wherein said genes are selected from those that include one of the sequences, or fragments of sequences, including complementary sequences, selected from SEQ ID NO: 1-1392. Using the methods disclosed herein, breast or other cancers can be readily detected using the methods of the present invention.

[0090] In accordance with the invention, although gene expression for a gene that includes as a portion thereof one of the nucleotide sequences of SEQ ID NO: 1-1392, is preferably determined by use of a probe that is a fragment of such nucleotide sequence, it is to be understood that the probe may be formed from a different portion of the gene. Thus, for each gene of the signature sets of the present invention, the nucleotide sequence disclosed with respect to a specific sequence ID number is only a portion of the nucleotide sequence that encodes expression of the gene. As a result, expression of the gene may be determined by use of a nucleotide probe that hybridizes to messenger RNA (mRNA) transcribed from a portion of the gene other than the specific nucleotide sequence disclosed with reference to a sequence ID number as recited herein.

[0091] The present invention further relates to a process for determining a cancer initiating, facilitating or suppressing gene comprising the steps of contacting a cell with a cancer modulating agent and determining a change in expression of a gene selected from the group consisting of the gene sequences of SEQ ID NO: 1-1392 and thereby identifying said gene as being a cancer initiating or facilitating gene.

[0092] Thus, some or all of the genes within the signature gene sets disclosed herein as SEQ ID NO: 1-1392 are found to play a direct role in the initiation or progression of cancer or even other diseases and disease processes. Because changes in expression of these genes (either up-regulation or down-regulation) are linked to the disease state (i.e. cancer), the change in expression may contribute to the initiation or progression of the disease. For example, if a gene that is up-regulated is an oncogene, or if a gene that is down-regulated is a tumor suppressor, such a gene provides for a means of screening for small molecule therapeutics beyond screens based upon expression output alone. For example, genes that display up-regulation in cancer and whose elevated expression contributes to initiation or progression of disease represent targets in screens for small molecules that inhibit or block their function. Examples include, but are not be limited to, kinase inhibition, cellular proliferation, substrate analogs that block the active site of protein targets, etc. Similarly, genes that display down-regulation in cancer and whose absence results in initiation or progression of disease are valuable therapeutics for gene therapy.

[0093] In accordance therewith, the present invention relates to a process for determining a cancer initiating or facilitating gene comprising contacting a cell with an agent that decreases the expression of a gene corresponding to a polynucleotide having a sequence selected from the group consisting of SEQ ID NO: 1-597 and detecting an increase in expression of said gene compared to when said agent is not present, thereby identifying said gene as being a cancer initiating or facilitating gene. Such genes may, of course, be oncogenes and said decrease in expression may be due to a decrease in copy number of said gene in said cell or a cell derived from said cell, such as where copy number is reduced following cellular replication.

[0094] The present invention also relates to a process for determining a cancer suppressor gene comprising contacting a cell with an agent that increases the expression of a gene that encodes an RNA at least 95% identical to an RNA encoded by a polynucleotide having a sequence selected from the group consisting of SEQ ID NO: 598-1392 and detecting a decrease in expression of said gene compared to when said agent is not present, thereby identifying said gene as being a cancer suppressor gene. The sequence identity may include identical sequences, as defined herein, and such a process includes embodiments wherein the increase in expression is due to an increase in copy number of the gene in said cell or a cell derived from said cell, such as by cellular replication.

[0095] It should be noted that there are a variety of different contexts in which genes have been evaluated as being involved in the cancerous process. Thus, some genes may be oncogenes and encode proteins that are directly involved in the cancerous process and thereby promote the occurrence of cancer in an animal. In addition, other genes may serve to suppress the cancerous state in a given cell or cell type and thereby work against a cancerous condition forming in an animal. Other genes may simply be involved either directly or indirectly in the cancerous process or condition and may serve in an ancillary capacity with respect to the cancerous state. All such types of genes are deemed with those to be determined in accordance with the invention as disclosed herein. Thus, the gene determined by said process of the invention may be an oncogene, or the gene determined by said process may be a cancer facilitating gene, the latter including a gene that directly or indirectly affects the cancerous process, either in the promotion of a cancerous condition or in facilitating the progress of cancerous growth or otherwise modulating the growth of cancer cells, either in vivo or ex vivo. In addition, the gene determined by said process may be a cancer suppressor gene, which gene works either directly or indirectly to suppress the initiation or progress of a cancerous condition. Such genes may work indirectly where their expression alters the activity of some other gene or gene expression product that is itself directly involved in initiating or facilitating the progress of a cancerous condition. For example, a gene that encodes a polypeptide, either wild or mutant in type, which polypeptide acts to suppress of tumor suppressor gene, or its expression product, will thereby act indirectly to promote tumor growth.

[0096] In accordance with the foregoing, the process of the present invention includes cancer modulating agents that are themselves either polypeptides, or small chemical entities, that affect the cancerous process, including initiation, suppression or facilitation of tumor growth, either in vivo or ex vivo. Said cancer modulating agent may have the effect of increasing gene expression or said cancer modulating agent may have the effect of decreasing gene expression as such terms have been described herein.

[0097] In keeping with the present disclosure, the present invention also relates to a process for treating cancer comprising contacting a cancerous cell with an agent having activity against an expression product encoded by a gene sequence selected from the group consisting of SEQ ID NO: 1-1392. More specifically, the present invention relates to a process for treating cancer comprising contacting a cancerous cell with an agent having activity against an expression product encoded by a gene sequence selected from the group consisting of SEQ ID NO: 1-597. Such a process includes an embodiment wherein the cancerous cell is contacted in vivo. The agent may include an antibody that reacts with a polypeptide encoded by such a gene.

[0098] Thus, some or all of the genes within these signature gene sets represent individual targets for therapeutic intervention, based at least in part on their pattern(s) of expression. For example, genes within the signature gene sets that encode cell surface molecules and are up-regulated in cancer as compared to normal cells. The proteins encoded by such genes, due to their elevated expression in cancer cells, represent highly useful therapeutic targets for “targeted therapies” utilizing such affinity structures as, for example, antibodies coupled to some cytotoxic agent. In such methodology, it is advantageous that nothing need be known about the endogenous ligands or binding partners for such cell surface molecules. Rather, an antibody or equivalent molecule that can specifically recognize the cell surface molecule (which could include an artificial peptide, a surrogate ligand, and the like) that is coupled to some agent that can induce cell death or a block in cell cycling offers therapeutic promise against these proteins. Thus, such approaches include the use of so-called suicide “bullets” against intracellular proteins

[0099] The process of the present invention includes embodiments of the above-recited process wherein said cancer cell is contacted in vivo as well as ex vivo, preferably wherein said agent comprises a portion, or is part of an overall molecular structure, having affinity for said expression product. In one such embodiment, said portion having affinity for said expression product is an antibody, especially where said expression product is a polypeptide or oligopeptide or comprises an oligopeptide portion, or comprises a polypeptide.

[0100] Such an agent can therefore be a single molecular structure, comprising both affinity portion and anti-cancer activity portions, wherein said portions are derived from separate molecules, or molecular structures, possessing such activity when separated and wherein such agent has been formed by combining said portions into one larger molecular structure, such as where said portions are combined into the form of an adduct. Said anti-cancer and affinity portions may be joined covalently, such as in the form of a single polypeptide, or polypeptide-like, structure or may be joined non-covalently, such as by hydrophobic or electrostatic interactions, such structures having been formed by means well known in the chemical arts. Alternatively, the anti-cancer and affinity portions may be formed from separate domains of a single molecule that exhibits, as part of the same chemical structure, more than one activity wherein one of the activities is against cancer cells, or tumor formation or growth, and the other activity is affinity for an expression product produced by expression of genes related to the cancerous process or condition.

[0101] In one embodiment of the present invention, a chemical agent, such as a protein or other polypeptide, is joined to an agent, such as an antibody, having affinity for an expression product of a cancerous cell, such as a polypeptide or protein encoded by a gene related to the cancerous process, especially a gene sequence corresponding to one selected from the group consisting of the sequences of SEQ ID NO: 1-597. In a specific embodiment, said expression product is a cell surface receptor, such as a protein or glycoprotein or lipoprotein, present on the surface of a cancer cell, such as where it is part of the plasma membrane of said cancer cell, and acts as a therapeutic target for the affinity portion of said anticancer agent and where, after binding of the affinity portion of such agent to the expression product, the anti-cancer portion of said agent acts against said expression product so as to neutralize its effects in initiating, facilitating or promoting tumor formation and/or growth. In a separate embodiment of the present invention, binding of the agent to said expression product may, without more, have the effect of deterring cancer promotion, facilitation or growth, especially where the presence of said expression product is related, either intimately or only in an ancillary manner, to the development and growth of a tumor. Thus, where the presence of said expression product is essential to tumor initiation and/or growth, binding of said agent to said expression product will have the effect of negating said tumor promoting activity. In one such embodiment, said agent is an apoptosis-inducing agent that induces cell suicide, thereby killing the cancer cell and halting tumor growth.

[0102] In alternative embodiments of the foregoing, the present invention relates to a process for treating a cancerous condition in an animal afflicted therewith comprising administering to said animal a therapeutically effective amount of an agent first identified as having anti-neoplastic activity using an assay process as disclosed herein according to the present invention, such as a cancer-related gene modulator as identified according to the processes of the invention. Such processes also include the ability to protect against development of a cancerous state by using agents identified by the assay processes of the invention. Thus, the present invention specifically contemplates a process for protecting an animal against cancer comprising administering to an animal at risk of developing cancer a therapeutically effective amount of an agent first identified as having anti-neoplastic activity using one or more of the assay processes disclosed herein for identifying such agents.

[0103] The processes of the present invention take advantage of the correlation of changes in mRNA expression profiles of these signature gene sets with potential (depending on the form of cancer) changes in DNA copy number of the chromosomal regions wherein these genes are located. Of course, the precise nature of the change in mRNA expression (e.g. a signature set of genes that are up-regulated at the transcriptional level) may also indicate a change in the DNA copy number for the genomic regions in which these genes are located (e.g. an amplification of the genomic DNA region that contains the involved gene or genes).

[0104] Many cancers contain chromosomal rearrangements, which typically represent translocations, amplifications, or deletions of specific regions of genomic DNA. A recurrent chromosomal rearrangement that is associated with a specific stage and type of cancer always affects a gene (or possibly genes) that play a direct and critical role in the initiation or progression of the disease. Many of the known oncogenes or tumor suppressor genes that play direct roles in cancer have either been initially identified based upon their positional cloning from a recurrent chromosomal rearrangement or have been demonstrated to fall within a rearrangement subsequent to their cloning by other methods. In all cases, such genes display amplification at both the level of DNA copy number and at the level of transcriptional expression at the mRNA level.

[0105] At least some of the genes that are contained within signature gene sets disclosed herein (SEQ ID NO: 1-597) display changes in their mRNA expression profiles (depending on the precise reading frame involved) within cancer samples due, in part, to changes in their DNA copy number as a result of specific chromosomal rearrangements in those cancer cells. The utilities that follow from this are (i) that the genes contained within these signature gene sets offer a time saving shortcut to the identification of novel chromosomal rearrangements, amplifications, or deletions that are associated with cancer, and/or (ii) represent key genes affected by such chromosomal rearrangements, amplifications, or deletions and, therefore, play a key role in the initiation or progression of the disease. Genes within the signature sets that identify changes in the DNA copy number (based upon their changes in expression at the mRNA level) afford an entry point into other forms of diagnostic assay for the initiation, staging, or progression of cancer to be conducted in tissue samples at the DNA level (e.g. if gene X identifies a novel chromosomal amplification associated with cancer, then that specific chromosomal region defined by gene X would serve as the basis for a diagnostic assay for cancer, where genomic DNA is extracted from tissue samples and evaluated for the presence of the specific amplification), and also the rapid positional cloning of genes that play vital and direct roles in the initiation or progression of cancer.

[0106] In one embodiment of the present invention, said change in expression may be determined by determining a change in gene copy number, wherein said change in copy number is an increase in copy number or wherein said change in copy number is a decrease in copy number.

[0107] A change in gene copy number may be determined by determining a change in expression of messenger RNA encoded by a particular gene sequence, especially where said sequence is one selected from the group consisting of the sequences of SEQ ID NO: 1-1392, especially SEQ ID NO: 1-597. Also in accordance with the present invention, said gene may be a cancer initiating gene, a cancer facilitating gene, or a cancer suppressing gene. In carrying out the methods of the present invention, a cancer facilitating gene is a gene that, while not directly initiating or suppressing tumor formation or growth, said gene acts, such as through the actions of its expression product, to direct, enhance, or otherwise facilitate the progress of the cancerous condition, including where such gene acts against genes, or gene expression products, that would otherwise have the effect of decreasing tumor formation and/or growth.

[0108] The present invention also relates to a process for treating cancer comprising inserting into a cancerous cell a gene construct comprising an anti-cancer gene operably linked to a promoter or enhancer element such that expression of said anti-cancer gene causes suppression of said cancer and wherein said promoter or enhancer element is a promoter or enhancer element modulating a gene sequence selected from the group consisting of the sequences of SEQ ID NO: 598-1392.

[0109] The signature sets or signature gene sets disclosed herein are useful in identifying genetic regulatory elements within the promoters of the genes contained within the signature sets that are specific to normal tissue and/or the corresponding cancer. Each signature set is a collection of genes that share a gross common pattern of transcriptional regulation in cancer vs. normal (e.g. a signature set of genes that are transcriptionally up-regulated in cancer).

[0110] In one such embodiment, analyzing and comparing the DNA sequences of the promoter regions of all the genes contained within the signature set serves to identify conserved stretches or motifs of sequences within subsets of genes that represent cis-acting elements that specifically drive a form of gene expression (e.g. increased transcriptional expression in cancer). The identification of such cis-acting regulatory elements is then available for use in driving the cancer-specific expression of suicide genes or toxins via genetic therapy using technology already well known in the art.

[0111] In separate embodiments, said anti-cancer gene is a cancer suppressor gene or encodes a polypeptide having anticancer activity, especially where said polypeptide has apoptotic activity.

[0112] In additional embodiments, such insertion of the gene construct into a cancerous cell is accomplished in vivo, for example using a viral or plasmid vector. Such methods can also be applied to in vitro uses. The methods of the present invention are readily applicable to different forms of gene therapy, either where cells are genetically modified ex vivo and then administered to a host or where the gene modification is conducted in vivo using any of a number of suitable methods involving vectors especially suitable to such therapies, such as the use of special viral vectors, including adeno-associated viruses and adenoviruses, as well as retroviruses and specially constructed plasmids to accomplish such therapies. The use of these and other vectors is well known to those skilled in the art and need not be described further.

[0113] The present method also relates to a process for determining functionally related genes comprising contacting one or more gene sequences selected from the group consisting of the sequences of SEQ ID NO: 1-1392 with an agent that modulates expression of more than one gene in such group and thereby determining a subset of genes of said group.

[0114] In accordance with the present invention, said functionally related genes are genes modulating the same metabolic pathway or said genes are genes encoding functionally related polypeptides. In one such embodiment, said genes are genes whose expression is modulated by the same transcriptional activator or enhancer sequence, especially where said transcriptional activator or enhancer increases, or otherwise modulates, the activity of a gene sequence selected from the group consisting of SEQ ID NO: 1-1392.

[0115] In one such embodiment, small molecule screens serve to identify changes in expression of genes within a signature set and thereby provide a tool for the identification of specific functional pathways and a means of assigning defined functions to novel genes.

[0116] In situations where a signature set of genes that are transcriptionally up-regulated in cancer cells compared to normal cells, such screens facilitate the identification of small molecules that down-regulate the expression of the genes of the signature set within cancer cells. While such therapeutics make a cancer cell “look” more normal, based upon the expression of the genes within the signature set, what actually happens when such screens are put into practice is that all genes within the signature sets do not respond identically to each small molecule within a chemical compound library. If an average signature set contains 200 different genes, for example, and the expression of all 200 genes is monitored in response to a library of some 50,000 chemical compounds, and subsets of genes within the signature set consistently change their patterns of expression in response to particular chemicals (e.g., 10 of the genes always change expression in a coordinated way, such as down-regulation of one gene within the group of 10) then it always causes the down-regulation of the other 9 specific genes as well.

[0117] Such subsets or subgroups of genes within each signature set that change their expression in a coordinated way in response to chemical compounds represent genes that are located within a common metabolic, signaling, physiological, or functional pathway so that by analyzing and identifying such subsets one can (a) assign known genes and novel genes to specific pathways and (b) identify specific functions and functional roles for novel genes that are grouped into pathways with genes for which their functions are already characterized or described. For example, one might identify a subgroup of 10 genes within a signature set (5 known genes and 5 novel genes) that change expression in a coordinated fashion and for which the 5 known genes are involved in apoptosis thereby implicating the other 5 novel genes as playing a role in apoptotic cellular processes. Therefore, the processes disclosed according to the present invention at once provide a novel means of assigning function to genes, i.e. a novel method of functional genomics, and a means for identifying chemical compounds that have potential therapeutic effects on specific cellular pathways. Such chemical compounds may have therapeutic relevance to a variety of diseases outside of cancer as well, in cases where such diseases are known or are demonstrated to involve the specific cellular pathway that is affected.

[0118] It should be cautioned that, in carrying out the procedures of the present invention as disclosed herein, any reference to particular buffers, media, reagents, cells, culture conditions and the like are not intended to be limiting, but are to be read so as to include all related materials that one of ordinary skill in the art would recognize as being of interest or value in the particular context in which that discussion is presented. For example, it is often possible to substitute one buffer system or culture medium for another and still achieve similar, if not identical, results. Those of skill in the art will have sufficient knowledge of such systems and methodologies so as to be able, without undue experimentation, to make substitutions that will optimally serve their purposes in using the methods and procedures disclosed herein.

[0119] The present invention will now be further described by way of the following non-limiting example but it should be kept clearly in mind that other and different embodiments of the methods disclosed according to the present invention will no doubt suggest themselves to those of skill in the relevant art.

### EXAMPLE

[0120] A breast cancer cell line or breast cancer cells are grown to a density of 10⁵ cells/cm² in Leibovitz's L-15 medium supplemented with 2 mM L-glutamine (90%) and 10% fetal bovine serum. The cells are collected after treatment with 0.25% trypsin, 0.02% EDTA at 37° C. for 2 to 5 minutes. The trypsinized cells are then diluted with 30 ml growth medium and plated at a density of 50,000 cells per well in a 96 well plate (200 μl/well). The following day, cells are treated with either compound buffer alone, or compound buffer containing a chemical agent to be tested, for 24 hours. The media is then removed, the cells lysed and the RNA recovered using the RNAeasy reagents and protocol obtained from Qiagen. RNA is quantitated and 10 ng of sample in 1 μl are added to 24 μl of Taqman reaction mix containing 1× PCR buffer, RNAsin, reverse transcriptase, nucleoside triphosphates, amplitaq gold, tween 20, glycerol, bovine serum albumin (BSA) and specific PCR primers and probes for a reference gene (18S RNA) and a test gene (Gene X). Reverse transcription is then carried out at 48° C. for 30 minutes. The sample is then applied to a Perkin Elmer 7700 sequence detector and heat denatured for 10 minutes at 95° C. Amplification is performed through 40 cycles using 15 seconds annealing at 60° C. followed by a 60 second extension at 72° C. and 30 second denaturation at 95° C. Data files are then captured and the data analyzed with the appropriate baseline windows and thresholds.

[0121] The quantitative difference between the target and reference genes is then calculated and a relative expression value determined for all of the samples used. This procedure is then repeated for each of the target genes in a given signature, or characteristic, set and the relative expression ratios for each pair of genes is determined (i.e., a ratio of expression is determined for each target gene versus each of the other genes for which expression is measured, where each gene's absolute expression is determined relative to the reference gene for each compound, or chemical agent, to be screened). The samples are then scored and ranked according to the degree of alteration of the expression profile in the treated samples relative to the control. The overall expression of the set of genes relative to the controls, as modulated by one chemical agent relative to another, is also ascertained. Chemical agents having the most effect on a given gene, or set of genes, are considered the most anti-neoplastic.

[0122] In carrying out the methods of the invention, it is to be expected that not all cells of a given sample of suspected cancerous cells will express all, or even most, of these genes but that a substantial expression thereof in a substantial number of such cells is sufficient to warrant a determination of a cancerous, or potentially cancerous, condition. The sequences disclosed herein are presented by SEQ ID NO: 1 to 1392 although different genes are more or less relevant to different organs and tissues and some may be up-regulated in cancer and not normal cells while others are up-regulated in normal cells but not cancerous cells. The sequences presented herein may be genomic or cDNA sequences and may also be represented as RNA sequences. The sequences of the sequence listing herein are mostly cDNA sequences but can be used to locate genomic sequences.

The application's sequence listing, which the Patent Office published only in electronic form, follows.

SEQUENCE LISTING (1392 sequences)

SEQ ID NO: 1 - DNA, 326 bp, Homo sapiens
gcgcacccggttcagctcgcctttcttggccagagggcccggttggactcacgggcggggcatgatggtggtgggtacgggcacctcgctggcgctctcctccctcctgtccctgctgctctttgctgggatgcagatgtacagccgtcagctggcctccaccgagtggctcaccatccagggcggcctgcttggttcgggtctcttcgtgttctcgctcactgccttcaataatctggagaatcttgtctttggcaaaggattccaagcaaagatcttccctgagattctcctgtgcctcctgttggctctctttgcatctggcc

SEQ ID NO: 2 - DNA, 335 bp, Homo sapiens
acagaaaatatagccatgattgaaatcaaatagtaaaggctgttctggctttttatcttcttagctcatcttaaataagtagtacactttggatgcagttcgttctgaagtgctaatcagttgtaacaatagcacaaatcgaacttaggatttgtttcttctcttctgtgtttcgatttttgatcaattctttaattttgtaagcctataatacagtttctattctttgagataaaaattaaatgatcactgatattttagtcattcttgcttctcatctaaatatttccatattctgtattaggagaaaattaccctcccagcaccagtcttcc

SEQ ID NO: 3 - DNA, 235 bp, Homo sapiens
cccagtgcattcgcatgcgtggacgctgtgtggagagtccaggatgacgggatcccgcacaagctcccttcagtccttcagggctgggcatgtggttgatttttctaaagctggagaaaggaagaattgtgccttgcatattacttgagcttaaactgacaacctggatgtaaataggagcctttctactggtttatttaataaagttctatgtgattttttaaaaaagaaaaaa

SEQ ID NO: 4 - DNA, 308 bp, Homo sapiens
accagttggacattgtttttttctggttatcctgtcctgccttactatgagatttacggatgtttggggacacaggtctctgggctcatttctttttctgaggattcatataattgcctagtttttggcttagaggttggtccttccctggtttaatgatgcttttgttcagactgtcctctaggacttgaatttgaagcagaaacagaacagcacctgatcctcagttatactgcaaagcagggcctcagaaagggtaactccaattactgactttcacctaaggtgaaaaagcatccggcttcttt

SEQ ID NO: 5 - DNA, 486 bp, Homo sapiens
ttttttttttgctgtaggcaccattctgcatcttgaacccagactgaagtgtgcctctcacagatggaaggtgcacacgctcctgtctcctcctcactctgccacgttcacttggctttttcattggtacctaggaatttaagaatatcgaagcgagacacgtaacaaaccatagatgagcagactcccacaccgggttttcttgcccgtctttaaggcactgtttctaaattttgaacttagctctgaatccccaagaacttgagcacagcaagggttgctgagctgctgtcgccgcagccctggcccctggtgctggagctgcagcacctttgggagaggtcctgcgtcgtcctcagctgcgtcgctgtgaactcccgctctccactgtgttcctcagtgtctgcttttcaggaagtctgctgtgacctttgcccaacttctgagctcctcagggactaggaacaatttcagtagctttgccct

SEQ ID NO: 6 - DNA, 379 bp, Homo sapiens
ggaggaggcccctgtgagcccactctggaacccttcctggaaccctccctactctgtccccctacagacaaccaagcactaatccccttagtaccaagaaaggggagccaggatttagtcctggcccagcccagagctgggacctggagcacgatctgttgacttccctgggtaggacactgccacctctgggctcaggtcctcatgcctccaaatggcatctagagtttgagcagccttcttggctgaggcaggcctagcctgtggagcgggctagggccaggagcatttggtgcccctccatgttgcaatgcaaacaccttcaccactggggcagtggggagagatggctatattaataaaataacgtgtgtctttc

SEQ ID NO: 7 - DNA, 456 bp, Homo sapiens
catatatacatgcagtctgcttgattatcagcaaaatggtcagcctttatcagatagtttcttcatgtggagttcatctgcatgtggcccttactctgaagcctcttcctgatctggagccacagtctgtctgtcttccagttcatctcagtcctcgagaaaggccctttaaatatgtcactttcccattttcctttaaccatgggttgtgtgagccagaaagagctttgagaaagatggctgcttccaccagggtggaggcttctaggtctgcatgatgatggggcccgtttctggccagagggtggctctgggagcagttgtgctgcgggcttgctgggggagaactctaactgttgcagaaacagagcttcatggcttgcttaaattacttagctggaatattttaaagtgtcagataatgtgatgtacaaagagagtatgccgatgcatttc

SEQ ID NO: 8 - DNA, 303 bp, Homo sapiens
  misc_feature (1)...(303): n=a,t,g or c
gatccagcggcagtgacagaatccaaagagggaacagaggcatcagcatcgaaggggctggagaagaaagagaaatgatgcagctggtgcccgagcctctcagggccagaccagacagatgggggctgggcccacacaggcgtgcaccgggtagagngcacaggtaggccaaggggnagctcccaggacagggcaagggggcagcanggatacctgcnagccagggnctctntggcctntnttttcctantccntttttttggcccttcttttttntntgccgtacancntgcaggcaaaagn

SEQ ID NO: 9 - DNA, 297 bp, Homo sapiens
  misc_feature (1)...(297): n=a,t,g or c
ctttttttcaggttaaatatataattncaagtgcttttaatgaacttatttttaattggctagggagcaaaaaataagtnagtnctgcttttagttagttaaccttgttcttttcttaaatagtacactgcatggtatttaatattccaggaagcatgggatttnattttgcttgatttgggcacatgaaataatagctctaggaaaatgcgcatcttaatgactctttgtaaagagaggcatttcttacaactgtgatgtttgcttacataaaagttacctcataagttaattcta

SEQ ID NO: 10 - DNA, 363 bp, Homo sapiens
  misc_feature (1)...(363): n=a,t,g or c
attttctccacctttgtttatatggtaaaggaatccttttcagctgccagttttgaataatgaatatcatattgtatcatcaatgctgatattttaactgagttggtctttaggtttaagatggataaatgaatatcactacttgttctgaaaacaggtttgttgcttttnatctcgctgcctagattgaaatattttgctatttcttctgcataagtgacagtgaaccaattcatcatgagtaagctcccttctgtcattttcattgatttaatttgtgtatcatcaataaaattgtatgttaatgctggaaagaaaaaaagaagaaagaaagaaaccatccctgtccttcagtttataatc

SEQ ID NO: 11 - DNA, 335 bp, Homo sapiens
  misc_feature (1)...(335): n=a,t,g or c
ctagaataaaggggttgattagtctgaacagtactaattaactacaaaataaacgttagtgantcagcctcttcctctataaacaatgaccaattagacgtttccgtaattccatgtattatgtatagtacactctataaatgtaaatgtaatgcttgtctaaaaagtgcaatttattgtacattgtcccaacaaatgtttacttttataatcgttatgaacttgaattggattagtatcttgtttttatgtgtgaatgaagccttgtgaaataacaaatgcaactgagaaggtacaaggtgactgtttttgtgagccagtgatgttttcaatgc

SEQ ID NO: 12 - DNA, 1522 bp, Homo sapiens
aaaagaggaaaccaacccctaagatgagctttccatgtaaatttgtagccagcttccttctgattttcaatgtttcttccaaaggtgcagtctccaaagagattacgaatgccttggaaacctggggtgccttgggtcaggacatcaacttggacattcctagttttcaaatgagtgatgatattgacgatataaaatgggaaaaaacttcagacaagaaaaagattgcacaattcagaaaagagaaagagactttcaaggaaaaagatacatataagctatttaaaaatggaactctgaaaattaagcatctgaagaccgatgatcaggatatctataaggtatcaatatatgatacaaaaggaaaaaatgtgttggaaaaaatatttgatttgaagattcaagagagggtctcaaaaccaaagatctcctggacttgtatcaacacaaccctgacctgtgaggtaatgaatggaactgaccccgaattaaacctgtatcaagatgggaaacatctaaaactttctcagagggtcatcacacacaagtggaccaccagcctgagtgcaaaattcaagtgcacagcagggaacaaagtcagcaaggaatccagtgtcgagcctgtcagctgtccagagaaaggtctggacatctatctcatcattggcatatgtggaggaggcagcctcttgatggtctttgtggcactgctcgttttctatatcaccaaaaggaaaaaacagaggagtcggagaaatgatgaggagctggagacaagagcccacagagtagctactgaagaaaggggccggaagccccaccaaattccagcttcaacccctcagaatccagcaacttcccaacatcctcctccaccacctggtcatcgttcccaggcacctagtcatcgtcccccgcctcctggacaccgtgttcagcaccagcctcagaagaggcctcctgctccgtcgggcacacaagttcaccagcagaaaggcccgcccctccccagacctcgagttcagccaaaacctcccatggggcagcagaaaactcattgtccccttcctctaattaaaaaagatagaaactgtctttttcaataaaaagcactgtggatttctgccctcctgatgtgcatatccgtacttccatgaggtgttttctgtgtgcagaacattgtcacctcctgaggctgtgggccacagccacctctgcatcttcgaactcagccatgtggtcaacatctggagtttttggtctcctcagagagctccatcacaccagtaaggagaagcaatataagtgtgattgcaagaagtgtagaggaccgagccagaaatcttagagatttcttgtcccctctcaggtcatgtgtagatgcgataaatcaagtgattggtgtgcctgggtctcactacaagcagcctatctgcttaagagactctggagtttcttatgtgccctggtggacacttgcccaccatcctgtgagtaaaagtgaaataaaagctttgactag

SEQ ID NO: 13 - DNA, 531 bp, Homo sapiens
  misc_feature (1)...(531): n=a,t,g or c
ttaaagattggcaatgtatgtgagagtatgcatatgtatgggtgtgtgtgtgtgcgcgcaatcaaactgtggtgtaaatagattctcagtgaattctggtattcagactctattccactagtgaaagaaccattttttaaacttcccttgccttttttatttatttaattttcttggtttggagatgtcagtcccaaacaccagagtctgtacttttctataacacagctcagattaaggtagggcatatgcaacggaggttctcacctccctaaagaagggacttgaattttagggactttaattcacccctccttcaatacaactttcccccttcttgtttgcacatgccaagataactgcttttatgcaggctgtacccccttgaaaaatcctttctacagtgctggtcacaaaagagcccaagttcggcctcctacccggnattgctgacttgaattcanagtcgccgagtctacctagctttcttggaagcagtctcgcaaaatntctatttgtncgtcactaatg

SEQ ID NO: 14 - DNA, 381 bp, Homo sapiens
gatatttgaatttagcaggtggagtttcatagtaaaaacagcttttgactcagctttgatttatcctcatttgatttggccagaaagtaggtaatatgcattgattggcttctgattccaattcagtatagcaaggtgctaggttttttcctttccccacctgtctcttagcctggggaattaaatgagaagccttagaatgggtggcccttgtgacctgaaacacttcccacataagctacttaacaagattgtcatgggagctgcagattccattgcccaccaaagactaggaacacacacatatccatacaccaaagggaaaggacaatttctggaaatgctgtttcttctgggtgggttccctcttctgggcttgct

SEQ ID NO: 15 - DNA, 2894 bp, Homo sapiens
  misc_feature (1)...(2894): n=a,t,g or c
gggcggacaggcacagagggagggagcgagcgagcagtgagtaagccagcaagggcggtcgggtcccgaggtcagccgagatttctcaggtccctccggccccctccctggagtccacagcgcctccggtgtccagaggatcggacacggcccggcccggccatggcctcgttgctgaaggtggatcaggaagtgaagctcaaggttgattctttcagggagcggatcacaagtaaggcagaagacttggtggcaaattttttcccaaagaagttattagaacttgatagttttctgaaggaaccaatcttaaacatccatgacctaactcagatccactctgacatgaatctcccagtccctgaccccattcttctcaccaatagccatgatggactggatggtcccacttataagaagcgaaggttggatgagtgtgaagaagccttccaaggaaccaaggtgtttgtgatgcccaatgggatgctgaaaagcaaccagcagctggtggacattattgagaaagtgaaacctgagatccggctgttgattgagaaatgtaacacgccttcaggcaaaggtcctcatatatgttttgacctccaggtcaaaatgtgggtacagctcctgattcccaggatagaagatggaaacaactttggggtgtccattcaggaggaaacagttgcagagctaagaactgttgagagtgaagctgcatcttatctggaccagatttctagatattatattacaagagccaaattggtttctaaaatagctaaatatccccatgtggaggactatcgccgcaccgtgacagagattgatgagaaagaatatatcagccttcggctcatcatatcagagctgaggaatcaatatgtcactctacatgacatgatcctgaaaaatatcgagaagatcaaacggccccggagcagcaatgcagagactctgtactgaggccagggccagggccaggggactctgtgagtctggctcaagaccgacattgccttggtttgttacatgactatcgtgatggggaaactggctggaaatagtaatcacacctctctgtttttagttagagtctaatgaaactctcatctagttctgtgatgtgtttacctcttttttcaggcctcaggaactcttctatttccttccctaataccccacacccaacctgtcgtaatttctggagaactccaggtttgtgtgtgcaggatgttggcacaaaaatacctgtgttttcattctccccctctctccctcctgtgtctggcgctttatgttttcttccgtttgataattagttggttaaaagctgagggaaccggaaggaaagtgctaggtgttttttaggaactagggtggaggggggacgaacttctcttcctcacatgaggttactgtttctttcctctgtggggcattggatcctcccacagttgccctggtgatgacttaggacttcccatctgtgacatcccactttgaatcttgatcgtgacaagaaataccttaggccttcagtcaattccgaagctccttcagttgtttttataatgggcgtttcacatgcacatatgtgtatgcatgtatacgcccatacagacatgcacacacagactcctactccattagctaacataccctccctctccacaacccgtgtcacatacctttcaggaggtgacagttgtcttagttgtcatctacccagacaaacgtcctgggcccgtcctccctcctgatactgtagcctcttggtacccagggtgagttggtggagaacagagagatgagaagcagagggcttggggaaagcctgttcctctctgactcagccctttttggcattattgcaagagcttgactcctggttgccttttcccagccagttttcagttggggtgaaggtttctgcaagtgtgaggtccagatgctgctgctcatgttgggctttccttttgggaactatttctctttatttatagtgtcgggcttccggggaaagcaatcattggtgtgtatgtgtatgtgccatgcacacacgtgcatatatacacatttgtgtatgtggaaatgtgctgggcaagtcaaaactatagaagagttgcctcctgtctctcgaatcttccagagatatcacttaattgttaacagcttttgtgttaatccccttcatcccctagcacttttattctaccacggctggagagttgananctacagtcagcctgccagtgactcttagtgtctgtttctgacttatttttcctgtctctgtcttccaacccccaataatatttcccaccggggatgcatcatttttactcccaatattctgtagagagggagtcaggatgctgtcttcccacgaatagtactcagtaacaaaccaattgcattttagttgggcagtgctcccacccaccctgcagatccctccagctaaaacccttcccccttccctccatgtgtttctcagtttcccgttcgtttgttggactgttccactgcccctcctcctcaccctatcacccatggatcgtaatgtaaaattcttttaccatgtcaagaaattattaaaaatacaggtactttgacctctttctaaagccgcagaccctggtgcaatgctctggtggctagggatgtactcatgctcatatgtgtgcacgcttggacacccacctccatggacacctagccaccctgttgtgtgnccttatgccagttgagctgaatcttttccccagtatagtggaaagactgaggcttctgcctactgagcaaggttgggtgcttcatttgtgttcagtctgaattatgggaaagttagctcttcccagacctaagctgccttctctccctactttcag

SEQ ID NO: 16 - DNA, 3076 bp, Homo sapiens
gaattcaaaatgtcttcagttgtaaatcttaccattattttacgtacctctaagaaataaaagtgcttctaattaaaatatgatgtcattaattatgaaatacttcttgataacagaagttttaaaatagccatcttagaatcagtgaaatatggtaatgtattattttcctcctttgagttaggtcttgtgcttttttttcctggccactaaatttcacaatttccaaaaagcaaaataaacatattctgaatatttttgctgtgaaacacttgacagcagagctttccaccatgaaaagaagcttcatgagtcacacattacatctttgggttgattgaatgccactgaaacattctagtagcctggagaagttgacctacctgtggagatgcctgccattaaatggcatcctgatggcttaatacacatcactcttctgtgaagggttttaattttcaacacagcttactctgtagcatcatgtttacattgtatgtataaagattatacaaaggtgcaattgtgtatttcttccttaaaatgtatcagtataggatttagaatctccatgttgaaactctaaatgcatagaaataaaaataataaaaaatttttcattttggcttttcagcctagtattaaaactgataaaagcaaagccatgcacaaaactacctccctagagaaaggctagtcccttttcttccccattcatttcattatgaacatagtagaaaacagcatattcttatcaaatttgatgaaaagcgccaacacgtttgaactgaaatacgacttgtcatgtgaactgtaccgaatgtctacgtattccacttttcctgctggggttcctgtctcagaaaggagtcttgctcgtgctggtttctattacactggtgtgaatgacaaggtcaaatgcttctgttgtggcctgatgctggataactggaaaagaggagacagtcctactgaaaagcataaaaagttgtatcctagctgcagattcgttcagagtctaaattccgttaacaacttggaagctacctctcagcctacttttccttcttcagtaacaaattccacacactcattacttccgggtacagaaaacagtggatatttccgtggctcttattcaaactctccatcaaatcctgtaaactccagagcaaatcaagatttttctgccttgatgagaagttcctaccactgtgcaatgaataacgaaaatgccagattacttacttttcagacatggccattgacttttctgtcgccaacagatctggcaaaagcaggcttttactacataggacctggagacagagtggcttgctttgcctgtggtggaaaattgagcaattgggaaccgaaggataatgctatgtcagaacacctgagacattttcccaaatgcccatttatagaaaatcagcttcaagacacttcaagatacacagtttctaatctgagcatgcagacacatgcagcccgctttaaaacattctttaactggccctctagtgttctagttaatcctgagcagcttgcaagtgcgggtttttattatgtgggtaacagtgatgatgtcaaatgcttttgctgtgatggtggactcaggtgttgggaatctggagatgatccatgggttcaacatgccaagtggtttccaaggtgtgagtacttgataagaattaaaggacaggagttcatccgtcaagttcaagccagttaccctcatctacttgaacagctgctatccacatcagacagcccaggagatgaaaatgcagagtcatcaattatccattttgaacctggagaagaccattcagaagatgcaatcatgatgaatactcctgtgattaatgctgccgtggaaatgggctttagtagaagcctggtaaaacagacagttcaaagaaaaatcctagcaactggagagaattatagactagtcaatgatcttgtgttagacttactcaatgcagaagatgaaataagggaagaggagagagaaagagcaactgaggaaaaagaatcaaatgatttattattaatccggaagaatagaatggcactttttcaacatttgacttgtgtaattccaatcctggatagtctactaactgccggaattattaatgaacaagaacatgatgttattaaacagaagacacagacgtctttacaagcaagagaactgattgatacgattttagtaaaaggaaatattgcagccactgtattcagaaactctctgcaagaagctgaagctgtgttatatgagcatttatttgtgcaacaggacataaaatatattcccacagaagatgtttcagatctaccagtggaagaacaattgcggagactacaagaagaaagaacatgtaaagtgtgtatggacaaagaagtgtccatagtgtttattccttgtggtcatctagtagtatgcaaagattgtgctccttctttaagaaagtgtcctatttgtaggagtacaatcaagggtacagttcgtacatttctttcatgaagaagaaccaaaacatcatctaaactttagaattaatttattaaatgtattataactttaacttttatcctaatttggtttccttaaaatttttatttatttacaactcaaaaaacattgttttgtgtaacatatttatatatgtatctaaaccatatgaacatatattttttagaaactaagagaatgataggcttttgttcttatgaacgaaaaagaggtagcactacaaacacaatattcaatcaaaatttcagcattattgaaattgtaagtgaagtaaaacttaagatatttgagttaacctttaagaattttaaatattttggcattgtactaatacctggttttttttttgttttgtttttttgtacagacagggcagcatactgagaccctgcctttaaaaacaaacagaacaaaaacaaaacaccagggacacatttctctgtcttttttgatcagtgtcctatacatcgaaggtgtgcatatatgttgaatgacattttagggacatggtgtttttataaagaattc

SEQ ID NO: 17 - DNA, 1412 bp, Homo sapiens
gaagagacagtttatcttctgagccgaatgggtaatagccgaagtgccctgaagatgattatggaggaattacatgatgttgataaagcaatcgaatttgccaaggagcaagatgatggagagctgtgggaagatttgattttatattccattgacaaaccaccatttattactggcttgttaaacaacattggcacacatgttgacccaattctactgattcaccgtattaaggaaggaatggagatccccaatttgagagattccttggttaaaattctgcaagactacaatttgcaaattctgcttcgtgaaggctgcaagaagattctcgtagctgactctttgtccttactgaagaaaatgcaccgaactcaaatgaaaggtgttcttgttgatgaggagaacatctgtgagtcgtgcctttcccctattcttccatcagaataacccagtggagagaagtgttgtggcttccatcctgctcagtggaatgctggtgctgccattgcttagagctgaggttctcaagctctaggatgcagctaagcccttcagcgtggtggtcttccattgccggcacatgttccacaaggagtgcctgcccatgcccagcatgaactctgctgcacagttctgcaacatctgcagtgctaagaaccgtggaccaggaagtgcaattttggagatgaaaaaatagctcatttctccttgtcagtctccttgtcaccactctttttgagactgtttttgcaacaacaaaagcatttgttgacactcgtgctgttaagagatttgtttatgtttatattatactcaaaaacaatttcttcatctattcctgtactaatggtttctctttgcagttcacagagaatttggggctctcttcatgccttgaaattttggggtccatagtgaatattttgttatttatttgtttggctcattctttatatagtaatggaaacataagtctaggagttagaaatgaattttttagaccttagtaaaaccatttaaccataaaatggacaactgagaattctcccagctgcctgaaagcgtcgccaactgtggttatcctgcaagctgctacctgcaacttggacgttgtttccacgtgctctgctggctacgattcttgcattctgggtttggcttttttctgtgtcatcaactatggttatcctctaaataggcatttaatgaaacattgtacaaattgtcactcatttgatgacacctgggaataacattagcaggctgatgtcctgcaccattatgtttactaatcacatgttctgtgtgctgtgacgactgtcaaagagtatctggccatggcggacactcagcatttgttgattgaataaatgttagctcttctcaaaaaaaaaaaaaaaaaaaaaaaa

SEQ ID NO: 18 - DNA, 470 bp, Homo sapiens
cgaaaaaaggaacaaagcgttactgaaaagaaggtaacctttgttggatgtgggccttagctccaggtccagactactactctatgttctccagaagggtgctaagtcacctactgaagagagaaccaactgactttcctattgactcatcaggaaccagtcctcagtctggtcaagttgtttcttatttgtgagcagttcaggctatctcctgatggggatgaggccaaggctttcttatcttttggttgtctctgcttaatggaggagcctggcctaggatggaggcctggcttagatctttcattccacctcaggaatgaggttgtgatctttcctgtcctgaccctctctgaattatgtttcaatagtactcttgattgtctgccatgttgttgaagcaaatgaattatttttaaatgttaagtaagtaaataaaccttagcccgtcaaaaaaaaaaaaaaaaaaa

SEQ ID NO: 19 - DNA, 738 bp, Homo sapiens
aatacagcgcattcaacttgcaaacacccttccactcccacaaagagcaagctgtcactggccaatcaaaacaatgaaccataatgaaacagtttttcttgctccacccactcggtgaccaaatttgaaaaaaaaaaaaaaccgcgccaactcatgttgttttcaatcaggtccgccaagtttgtatttaaggaactgtttcagttcataccttccactgcgataggaatcatgtctggtcgcggcaaaggcggaaaaggcttggggaagggtggtgctaagcgccatcgtaaggtgctccgggataacatccagggcattacaaaaccggctatccgccgtttggctcggcgcggtggggtcaagcgcatttccggtcttatctatgaggagactcgaggtgtgcttaaggttttcttagagaacgttattcgagacgccgtcacctatacggagcacgccaagcgcaaaactgtcacagccatggatgtagtatatgccctaaaacgtcaggggcgcactctgtatggcttcggcggctgaatctaagaatacgcggtctcctgagaacttcaaaaaacaaaaaaacccaaaggcccttttcagggccgctcacaaagtcgtttaaagagctgaaatgcgttgcgagaatgagtttggatgacagaaataaccgtgacagcctgcataagaatgaattgtgtttgccatgaccggccacactgtgacaaaatttca

SEQ ID NO: 20 - DNA, 446 bp, Homo sapiens
aactgaggcatcatggcagtttaatagtgaggtatttaattgcatttttataaaaaacattgcaaaacaaagtgacaatagggacctaaattctttggacttacggtagagatgcttgaggatcctaatattctacttctgccaacatgtcaggtaggaagctcacaatgttccccataagccattacaaactggctaaggaaaatcagtcatgactaagtccttgtctgcatcacgctcctgcccctccacacactgtctgagcgtgcacttttctttcgaaggctaatttatgaggcattctgcctgagtcagggctattgctaagtggaaggtttgatgaacctcccagtagaaaatgcaaggcctgcaaaaatgccgaacagctccgatttactatgggcttataatcaagggcaaactatacaataagagggttggtattt

SEQ ID NO: 21 - DNA, 442 bp, Homo sapiens
  misc_feature (1)...(442): n=a,t,g or c
ggtgttccctgagcggttgctgcgggtgatggatactcttctgatactggctcttcgtgctataatttcttttctcaccaagagcaggtgccctttcagaagggaatgggantngagggagggtcacagaaacacctcggcactgggggaaacgtggcctagcctctgngancggcgancagcggccggaanactggtgggctgcgggccggcgcgggttcannaggcttctttttccgcggacggagacactngtacagcccaagtctcgagnaaacgccaacgccgacgccttctccaacaaaagatggcctcggactcaagagtgcggctccagggcaatgcagccccaacctaaagatttagaggcctcccgtttcgctggcccccagagccgnccaccgcgactgcacttccccancgataaaaggtggtttccaan

SEQ ID NO: 22 - DNA, 413 bp, Homo sapiens
tacagagaatataaaaatacattcactttattttagaaaaatgaagactcatagagtaagcttatcacaaactggcctattaggagtcacagaattcacaggaaacaatttctgaagaccaggtgcctgctgccacctctccaagcaggccagagtccagtagagaatgcgattcaggaagatggctcctcagagggcagggaggttagctacggaggccgctcacgtggaaatgtccagtgaaccaatgccaaggaagaagataaaattctctggggctgaccacaacagtgggggtggataaagacaaaccacttgcctgtacttctcatcttctatttgttcatttcactgctggaaggtgacctcttttcccctaatcttctttcaacccagagagtttaagtcttctc

SEQ ID NO: 23 - DNA, 388 bp, Homo sapiens
  misc_feature (1)...(388): n=a,t,g or c
aagattatacgaangatttattgatactggttaacatccattatatacaggtagaaactttcaaaattgtacaaagaaccattaagcatattgataaagacagttttacagacaaaacaactggaaaatagttttaacatacacaatatataattatgaaaaaaatgtagaacacatattgttctaccagataaatcccaaggttattaaaagtctgctatgcagacctttaagttgaaaaatgtgttcaatggagttacatggttttagaaaattaagtataatgttaaaattaagcttttttttctcattgcaatttgggagaggaactgagacaacttttttaccccaaatctatacagtttgaaaaataatttatatgtctagc

SEQ ID NO: 24 - DNA, 415 bp, Homo sapiens
ttcttgctttctttaaatctttatttaaaagtccatgctaataatgtgtttacatttttacagttacattatgatagaaactgttggattttttaaatatctaaaacaatggcccactgaagaaaggaacaattaactctttaattaattccttaggataaatacccagaaatttaacagctagggcagacttctaatacaataccgaaagtccttccaaaaaccaagtggttgccaacttatgtcccttagcattataacattcttgagccaatagtgtaaaaatacgctgacaattttataggcaaacattactcaaggtatcttactttccacttattactaaaggtaattaacccctaaatagatgctcctcaacagtgggactacatcctggtaaacctatcataagttg

SEQ ID NO: 25 - DNA, 637 bp, Homo sapiens
  misc_feature (1)...(637): n=a,t,g or c
gaattgtgaagctgtttatcaaatgtttaagagaatttacacaagaatgttttgaccccacaaaaaataatgtgcctaagctttaaacaaaattcacattttatttagattgaaataaactatacaaaattgattttcttcaccaaaaataacagcaatattttccatatttttctagataaaccacaacacttattttgtaggttttccaggttttgcttataaatcaagatgaggcagtatataagagtcatggaaaaagacagagaaaaaaaacagacaaatcagttgtcagtatccatggcctctgattctgtctcaaccatgaaacagaagtgttcaacatatacctgctaaaaagcttaggaagatgtaggctccacaaaggaatgtaaacagcaacgagatgtggaacaacagcaggcttttccattcaaactttgtcatttgtttcctttaagttcaagaaagaccaaatctacactggaaatccctgtttgggtgagctcacaagccttttctccgggtaatttcctgtaactgtccaggtatagattttaaccataccttaaaactccctattagtcaaggnccaattgtgggcttcncctacacattttataaatggtatccctcc

SEQ ID NO: 26 - DNA, 261 bp, Homo sapiens
gagggaaagacaaaacgtatttattccaggccaggtcttaaaatgcacactgcacggttccctgttgttatcagcaccagtaaggaaagaacgtgccttaacggcagccccacccagagcctgctgcgtggctgctgtgaggctccccatgaatccacgcagtcttcttcctcactggtgcagttggtgaggttttctaccctcacagcaaagggatccttaactataaattcacggtatgcagagaagaggacagaatct

SEQ ID NO: 27 - DNA, 445 bp, Homo sapiens
tttttttattgttttatagttttattttttttaaatgacagttacaagtgcttttcccttgatgggcaatgacgtaactattttcagttattagtaatgccttaaaaagtaacagcattttgtctaaactgaacttatataattgcacaaaagtcatggaaagcattaagaaatgctggtaaagattgaagttttctcagattcttgcgcaattccaagaagccttgattccagtgggtcctctgattcaaacaataatgatgctcaaactcagtgacacacaggtagagaacagcagcacaaccaggagaacccatgtggtttgtaacagtgaaattctgctctactgttaaggtttaatgatgcattcattcatcttttcattaggagcataaaaaacacctcaaattatattttctcaggcttaaaacttgttttgagctat

SEQ ID NO: 28 - DNA, 444 bp, Homo sapiens
  misc_feature (1)...(444): n=a,t,g or c
tacaaaaaacaattgttatttgtgtacttttaaaacctcacagtaatattttcacactaccttcttggctgaaagttcacactcggaattccagagcagtccatggccaggcccactggntccccttgctctctccttggctttggtaaccactggccccagggactcagcctgctttcctatccatcccctcagtagctgtcaccatgcaggttaccccttctgtttcttctaccactaactccatgtctgactgcaagtgaaaggaacagaagcccaaacctttgggttttaaggagtttattgctaatctgtaaaacagaaagagacaggagataagcatgacaaaatatagggaagaaatgacttttgcctaaacttccaaactgtgtacaattgaagcctccgctttatagctcttagcacacctctcaaataagaagg

SEQ ID NO: 29 - DNA, 451 bp, Homo sapiens
ttcatatttcaagtgtttttattctgagcagtaggtacaaaaaataatgacatagttgtgtctaattctgtatagttcagcaccctccacaggctgtcaatctctgatttgatctacttttaccagatttaacagatccttgaatttactttactgtatatacttccttcttgctcacattgggaatcaaactaatgctggaaacatgcatcttcagacttcattgaggaattccagattgagacacgctgggatgtggattgagtccatggttagagaagatggattaaatggaaacaaaacaggaaacatgtgcttggcatctaatagcagttgctgagggtcattccgctcttgtagttgtgcctggattgttcgtataaaggccactgttacccgttcttcaaattcattcaggggagtataaaggtttaaaattttgacaatctgc

SEQ ID NO: 30 - DNA, 466 bp, Homo sapiens
  misc_feature (1)...(466): n=a,t,g or c
gagcacaaaggtccactttacttacatgaaggaacataaaggcatgagaaacagtcatctcaataaatgcaagacatgagcataaaagaggttctctgcctttccagcgttgttattacagagagaaacctacaattattttgttaaacaaaattcaaggctccaggactcatctctggagctgatatgtcttaaatactattatagtaggaaagggagaggagaaaattccccacccactcccccgatttggcccgtgtagcttccctttgagggtgtgtgacttgccatctgcaaaagtcatggccaaaacaggaactaacaggccaaactaccatcaatctagtcttctacagcaccctaacagagtgccagggtcctctgtcncctccgcacctgaggncaaagttccaggaagtttactgccggtgttaggaggtgagctcaagttcagtgtctgncttct

SEQ ID NO: 31 - DNA, 418 bp, Homo sapiens
gtggttttaatctgtgttttgagatttttttcaaatggaaagatattacagatagaaacacatcattctaggtttcaaaatcaccaaagtcagtgagaagaatgtacattcatttaaatgtaatcatttgtaaataaagaaatcttgaaaaggctgaacagttcaatcaaattgaagaattgatctagatttttcattattctttttaaataatgagtaagtgtagatatagtgtacatacaagttgacattctgattcattcaaaatagtcacatccctttgcttggttttggatgttccagagactaaaatttaataccattcataacatagtattttcagtaaaaagaattatagagcaatgaaaaatcagaagatggctcagagagctttataatctctaaatatacacacatt

SEQ ID NO: 32 - DNA, 418 bp, Homo sapiens
tttttacaattccataccaccaccacatctgttctgtgcttttattttacgaaaaagctaatggcaaatctacattaaactaagttgaatacaaagtcttagtgaagaaggcctggtggtctcgtttacaaaaatggccagtgtcatatttgggcttaaaatttcaagaagggcacttcaaatggctttgcatttgcatgtttcagtgctagagcgtaggaatagaccctggcgtccactgtgagatgttcttcagctaccagagcatcaagtctctgcagcaggtcattcttgggtaaagaaatgacttccacaaactctccatcccctggctttggcttcggccttgcgttttcggcatcatctccgttaatggtgactgtcacgatgtgtatagtacagtttgacaagcctgggt

SEQ ID NO: 33 - DNA, 446 bp, Homo sapiens
tctgaaaatcagccttttaatctagttgaacccaacgagtggggaaagaactaaaacatttttttcccttcagattttgattataagaataacgggtcagaggtgtctcttccataggaaactgacatcccctatgtcctcagagttgtttttttttttttttcttcaaaaaaatgcataaaagaatttcaactcatgtgcatgccacacatttccatccccaccccaccctgccccaccctctacaggcacacatattcacacaccaaagggactccttcctgtaactggggaacagaatgtaaaaaaatccatccaagtggccaccgataccagaaataaccaaatgcatttacactcacaacatcagtcaactcacatgcacaaggagaagcgtctccaatcggagcttagagccaaaaattacaaatggcagagacttgagc

SEQ ID NO: 34 - DNA, 581 bp, Homo sapiens
  misc_feature (1)...(581): n=a,t,g or c
ttttaagtcctcacaacagtgattttattaaattagttgctttataaaacattgcagatgtcataattgttaacataacaatttaccaaactgtagttaactggtgcagtttgctgagcatgttttataaaggaaaggaaaggaaatgccaaaaccctggtaaagttgttccattgcagcctaagagaacaaagatttgtttctcagacacttaaatcaggcaaataaaaataagtttccctcccccacctgaagcagttcatcagtagaaatagcctgataaataactagacagtctttgcactcgagagattccacaacatgtaatgcaataatggaaaggtttaccttctttagcttcaaagttggagggttttggtcattttaattttatatcaaactagtgcttttcagccgcagtatcttcactctgagataagcagtcttcttccacaatggaatttttnatatccccatggtccatttttaagaccaagccaattttaatacnaggtgccccccacatggccctggctgcaaacngcttttcctggaccagntttgaagtagttccaggnggg

SEQ ID NO: 35 - DNA, 465 bp, Homo sapiens
  misc_feature (1)...(465): n=a,t,g or c
tttttttttttttttttctaaatgaagtgcttttaattttcagaccaaacatttttaatataaaaacattttgataatatacaaacagcaatcacaacagcatccacatggcagcaaggggaccagggcacagagngggggagcgggctggggagggacagttttcagggtcccagttgcttccctggcttgaaatcaccctggtcctagcagaggacaggttaaggctgccagaggangngggtccctgacctgggcccggagacagactgcccaggcaggccctctgataccatcttccaaccatggcagcctccaggaaaagccagatccatttaggagataacaggaaggtggctgtgattgacaggaaaggcaacatggttcctcagcatcctgctgatcacacctctgggaggggctgctggattgaagaggacctaagaatcttcctgggagcaggac

SEQ ID NO: 36 - DNA, 382 bp, Homo sapiens
tacatgtatattatttattgttgattctgtacaccaaatggattacaagcagcatccagcagaagacagaccccccaaccctgcccaccagggtcgacactctacaaaaccctgagggcctagaaatctgtaaatgcatcgccaagcactggggctgatttgcagtaattctctaagcaaggcaaacatgatctagctttgaaggcagcatgaaggcagcgggttggtgagaacaatctctccttaagagaagaagatacctggggcggaaggagttttccccggaagtggcttgcagcccaccctctctgaaccacagccatggcttccttcccaaggccactgctggcttcccaacaacgcagattcagttctgactgtg

SEQ ID NO: 37 - DNA, 323 bp, Homo sapiens
cttcacacagtaagatcagtgtttgctaagtgttatcagccaatgtacagcaccccccaacaccgtcaaacgttgttccagttattttactttaaaagaggatttaaataatgcgacgtgctttccactgagccactaagtaggtgtggacgcacaaccttcaacactaattgccctttactaagccgaccagggctagacactaagccagaaaagccttttccagagtttcctcttccgcacaaaagctttccttctgtcactccacccaaccacccagctcctcccttaagtgtttgaaagataattctataagtctcctc

SEQ ID NO: 38 - DNA, 416 bp, Homo sapiens
ttttttttttcaagtatatttactctttattgcattccttcatttgcattaaacaatattttttcaatacagttttggacaaaacacaaagacattaagctcatttaacaagagacataagttaacacaatgtgtgctgctttcatgaggaggaaagaggcaagatcttagaggaatccaggatactggccaccaggaatcacaggatctcacaatacaatccacttctttaaaagccacaaaataagctagggaagaaaacccaaaacaaagaagatatgacatccaagtctccaccaaaagtatacaaatggcaagatttggagatgatctgctttctcacatgaggacaaataacagaggagccacacccaagtgccactgtggccacaagcctcatgggtggcgtgtgaggt

SEQ ID NO: 39 - DNA, 427 bp, Homo sapiens
tcttatttaaaatattttaatttctaaaaagcttaaatcatattaaaatttaaacaatttcattgtacagtacttgacaatacatttcaacaaactgaaaggcaaaccagtaaatcagttttgcttactttctaagcttaataatgtacagactcttgctcttcaagaagatgcaaaaatcagcaacagtacaagtgaaatatttaaataggaatctgaaacaaaacgaattcaatctgatcaaatccacaattaattgaagttttcattttattcaattgtgaataaaatagcagacactgtttcatccaataagccaatgatatcagcttaggagaaatgatctgcctggcttgtgcaagacaagaacagttaccttctgctgaaaggatgtgagttttcaaatttggttttcatgtcatagttt

SEQ ID NO: 40 - DNA, 275 bp, Homo sapiens
ttcaaatgtcacatttaatgttttcaccactgtacttcaaatctacattgtacaaagtgaccagaaagtgtgccacggtaattgaccaacctctgagattgtacctttcacaccagtgtcttcttgggctcttttgatactaaacacgtttctcattcaagtgaattgaaatgcttcagttgggttgattctcaggagcctcataaaaaaaaaacaaagatattgcaccatctttgtttagtaattcaatgtttgtttctttcacagcaaataat

SEQ ID NO: 41 - DNA, 366 bp, Homo sapiens
ttttttcataatgatttatttagataacaaacattaatgtgaaacatacaggctattggcaaccactattctaaaattatgtaagtacaaataaacatactgaaatgtgtgcaattctaagtttttaaaccagaagatttctacactaacacacatttatattaatgacacataaaaaaaataaaaactttattacaaaaataagttacactcgcctccagcttacagtataaaacaattttatttgcaggaatgcaaaatgattgtttgccatgagcattttgaacatatgacatgtccgattttcttgttaaatttgcatttactggggaactggtgtgtataaaaccttaattaagtataagc

SEQ ID NO: 42 - DNA, 272 bp, Homo sapiens
acatagaaaaaaatgtatatttatatccctaaaaggcaatacagaatttataaccaaaccatgtgtgagaactgttaaattacattccaaataccagcagtggaacaaacagaaacacagagatgttttaaaaaacatgcagcacgttacaaagaggccgtgtaataattcacaacttttgttagcagccgttaagtttgattagtattaagcagcaatggtttaagcaattttaaatcatgatatgatagttacatatatgcattttactg

SEQ ID NO: 43 - DNA, 337 bp, Homo sapiens
tttttttaaaattaatcaaccaacacccattctatttaaggttccaaaaggaagtagctggacccggctgcagacacactcccaccttgcttctgtcccaaaagtacatcccctacgtgtggttctccttaaacaattttaatgtctgggttggggaagcaggtagagcgcgtagaggcagctgctagaggctggttgctgactccaggccgcgttccaggaaatatcggtgggaagaacggggacgggcttgggacccttcattgaggaagtaggatgtgatcttcctgagtccctcctgattctcggatgctgagtcctcccatataacatcttc

SEQ ID NO: 44 - DNA, 423 bp, Homo sapiens
acattcagatgtttttactgcttgattacatttcttggtttcacatttaagacttcaatttataagaagtaaattatatgtttttcaatttaagaacagatgaatgcaggaacattatgaacattatgttggggaaaacaaagagaccccaaattaaaaaacaaaacaaatcaaaacataactagttgtgcagctctggagaacttaataaaaagtaaatcaacttttaaatcagttaactttggcgtctgaatacaaaatgtttatcagtattacctatgtagatgactattaagggatgtgcagcattttcaaaatccctgtgtgtcctttgtatgcatgtttggtacactgagttctgtggtcactgtcctctcttcagcagggtttttttaccccagtacgattgtccatctctgtatt

SEQ ID NO: 45 - DNA, 408 bp, Homo sapiens
gattgtattcaaatttttattttttgaacaaaaatttaagacaatgattttaaataataaaacatggtatatattctagacactggttttttttaaagatttattaaatttagactcctatagttctgttgtgatgctttcttcaacatttatattatttcttaccattttatcatcactccaagcttgctaaacaaagaatctctctgttaagtgaagttttacattaaggaaatactccactagcacactgaacaaacctacagaactgtcctagtttatatttacaaaacacaagaagtctgtccagccattttggttttgttgttacactgtccatactgagatcagcagagagctaagtaatacacaagattacgcttcggcagtgcaaaggatggcatcaac

SEQ ID NO: 46 - DNA, 369 bp, Homo sapiens
gcaggtaatcttattttcctaagggtagtttcatgatgacagtgtcaaaaaattactgtggataaagaaaaaattgtctcaatgaaatagaatttttcactgaacacagaaaccatctcaatagttgctgctccctggtttccaggccacgcaacagacatcaaaccaggaagccaaactttcatggacctgtgttaagaaaaacacacatacatgggcatactactttttccagaaaaacggaattaggcagagaaggaagtgtgggtgtacaactgatccacaagctattgggaaatcaatagctaaaaaatgtcaacaccctggcttccttttatcaggaactccaggaggctgaaggaatgtgag

SEQ ID NO: 47 - DNA, 362 bp, Homo sapiens
gttaccaatctgaagtgggagcggccgccatttttttttttttttttttttttttaaagtccatagattttaatgaaatttctattcctgtctctgagcggctgctgtgctttgtctgggtcccccaggggacaagagtcaggctggaatgagacctctgtctgccaggcctttgtggaggcctgggaggagaaaggccaaaggctttgatgcttgggaccgatgcccggccactcagctccagacaccagggatctggcaagggggtggggcaagggccagacagaccaacagccttggggtcctggcgagactcgccaagaccagatctgaagctggctgggccaaagcagctgaggcgg

SEQ ID NO: 48 - DNA, 394 bp, Homo sapiens
caagatagagggtttttattgaaagtaggttatgcaaacttggcttgaaaggtacttatcattttaaaaattatgcctaatgatgcatcaaatacaaaaacatataatacatcaatagtcaaccctttccccataaaggcaaagttactgagaaatgtttatttttcctctggtaatggctaatccaggtaataatatgaaagcaaatggaaaattcacattgcttctttcattgcttctgtcccttaaacctgttaatctttcagaaccacattactgaggtgctggcctgtgcatggaaacccaatgatatccaggtcttacaggtccagggcccagtggacagacaggccctggtcctccacgctggccaccatgtcttcgatggcattcc

SEQ ID NO: 49 - DNA, 385 bp, Homo sapiens
tgtgatgcagcatcaggtgcttttacttcagtgaatgaaaaataatggtcacaactcaaatgaatgggaatttaatatgaatatatgcaccttaccagagatgtttgctaccaatgatatcttagcaattccatattccttacaaagtcagtataattgttgtaaaaaaatcaactgtggttctgaatacccattcacagttgacctcaacaatgtatctgatgtaggagactgagtatccgtgacaggcagaagcatgtgatggtcctcagtcccaagtggaagagctaatggtaaagtcatatcagaaggcttcacatccatagtttctgataaaggacttttttgtatggaatcctgttcactcaaagtatgatcctctgca

SEQ ID NO: 50 - DNA, 500 bp, Homo sapiens
ttttggaataccattgtgtttattgatcaaacctggcttcgagtgtgacagagccattcttggttctccttggaagtaacaagaacactgggtaacatgtgaagtgcatggagactcacctgaatcccaccaaagtagtagctggacccagtagcctagcttattgtcttggcagtgcccctacccagtaccattagacctggctttgtcccttacataggacagactgggcttctccactcccgccaggctggccctacctccacctgtccttggaagctagtatgtaagtaagggaggagtcatcaagtttatagatgggtaggctgaggattgaggcaggaggggacttaatggctgagtccctggcttgttccagagccctggcccttgagcccctggactggtcagtgcatggacactctcccctcccagctcgggcggaagacttttcctgacttagctgctccatacacacaatctataaatatgtatttgct

SEQ ID NO: 51 - DNA, 313 bp, Homo sapiens
actgaaaaactcagactttattcagattaagttcctctacaaaaagtagggttctgtcccatgtgtctctgacacatttacaaaataccagttttttaaaattttggtcaaattatgagtggttgatttaaaaacttttccaagaagaagaaaagcatggagtagtaatttaaagaactcaataaaaacttctattttttattttaaaataatatacacagtgttattttcttcaagaccgtcctgtggatgtgaaatccgtcttcgcgtcatgtatctcccatatccagcagttcagccatccagctacctt

SEQ ID NO: 52 - DNA, 207 bp, Homo sapiens
  misc_feature (1)...(207): n=a,t,g or c
gtggaagaatacagaaatatgtttaatacttagtatcaaactaaaaagtaatataaaattacaaaacttcttttttttcatgcacaggcttttnctggtaaggaccgctgggattgaacagaagcttccggtaaataagggccccgtcggcaagacagcatactgctgtcacaagtgcaaacacccctccaccaactgtcaatgttg

SEQ ID NO: 53 - DNA, 221 bp, Homo sapiens
aaagcgctgatggaattaccctgctagggaaccagcatacatatgtcattcctttgtacagtatttttacaagtatttgattttgtttaccctaatttatccaactcaggaataaaaaggaatctcagatctatgagaaggacctccaatttctcattctcagcttcaaaacaaattagtcagtttaacattagtcaagacacaggttgctgtgaaataag

SEQ ID NO: 54 - DNA, 228 bp, Homo sapiens
  misc_feature (1)...(228): n=a,t,g or c
gaaaagaaatctatttttaatggctttggctttatagcacgaagcaggcacccnctcgttaaaggcacacagtcctctcttctgccccacctcctgggtccttaaaatcgagtcctgagttccagaggggtcactgcaaggcagcagggaagggagagggtcacagtttcactctgtgagtatcagacacccagggccaaggcccagactggcctctgaagctaaagg

SEQ ID NO: 55 - DNA, 536 bp, Homo sapiens
ttacaggtatcttaactttatttagctctctgtagaattaacatctttgcaaatatattattcaaccaagcatttgccataaagataagcatcaactttcccattggacaagtgatagtgttcaagctacttgacttgtgaaaaacaaaaaaccaccatgacttctcaacaaatacattttaaaatgaaatatgctcaggctgataaacaaacaagatattaaaatggagactgacattgaactacatagtcaacttgaaaaacacaagaagacaatgctcctataaaatgatatattattggctttacaaagacatactggtttatgtttacaactatgttttattttcaaatggtaaaggaaaggcttcatgttgctatttgaaagtacttctcaactagccgggcatggtggcataattcctgaagtaggaggatcatccccttgaggccaggaggtccaggctgcagtgagctgtgattgtgccctgaccatagcttgggtgacagagtgaactctgtctcaaaaaaaaaaa

SEQ ID NO: 56 - DNA, 535 bp, Homo sapiens
ttttgaaaaaagatcacagaataattttatttataatgaatgttattctctccagacttcaactcatcagtttactcttataacagagaatcaatttaaataacaccatcaaaatggaatgaatataaaacaatctgctattacgtatcgatttctttgataggatataattatagccaattagtcttgcaacacatggtccatttccagtgaaattctcaataaactgctaggaattacagtccttcatattgacattttattgtaaagtctgctagacgtggctctcttgattgctttggaagtcagtcaaacaaatgctctgaagaaaaggctgacaccgcaaaacaacttcatatgaaatctgtccacaaatgggatagcaatgcctccagatcctttggtttttatcagtccctttggaaagttaattaattgatgattgttcccttaaaattctattttaaataggacaatcactgtctatacagtctgtgccagcgtccttgactttcttgcttccactgatttgttt

SEQ ID NO: 57 - DNA, 378 bp, Homo sapiens
gagagcacaactccaaatcatcttttattaatataaaaagggcatatttagcaaaagacacacagataaaagagtcactatggctcaggacacaaggcagggaggtgccaggcctgtgcccctgctgggggagaaggaggctcgggacaaagtgggagaagtgctgggaagggctgagcggtaggggccacaaaagttccggtgggcaacactgtcggcaggtcatgggtgggactcatggggacctcgctgctaactcttgttgtgggggggtgtccttagtgctgccacctggagggccactccttggttcctggaggggacccaccaagggacacaggacaggaagcccaggatggttagtgcaactcgggatga

SEQ ID NO: 58 - DNA, 225 bp, Homo sapiens
ctccaaggcatttattaactcctgagtgtcacggggccaggggaaggctggagcaaaaccaagtctctgggggcgggggtcctctctggatccccactactcagctccccgggctccccatgcagccctagagacgggagaagtccagtgtgctgttcaacttccctccaagtccccaagaaagtgggaggcagtgttccactccagtgtcgtccagacgaacaa

SEQ ID NO: 59 - DNA, 357 bp, Homo sapiens
tttctttaaccgtgtggtctttatttcagtgccagtgttacagatacaacacaaatgttccagttagaaggaattcaaacggaatgccaaggtccaagccaggctcaagaaataaaaagggaggtttggagtaatagataagatgactccaatactcactcttcctaagggcaaaggtacttttgatacagagtctgatctttgaaactggtgaactcctcttccacccattaccatagttcaaacaggcaagttatgggcttaggagcactttaaaatttgtggtgggaatagggtcattaataactatgaatatatcttttagaaggtgaccattttgcactttaaagggaatca

SEQ ID NO: 60 - DNA, 378 bp, Homo sapiens
aacataaaaaaataaatttattttgagtctgaaatactgaagaacaagcatacagataaatagtacaaagaacaaaaattagaacatgagtaatgacttaagacacaggcatttttctagctattgcatacagacacatttttacacacaaacatattttttaaagacatctctccaacattctcaaaaggcaagagctgtatttgtgacatttgtaataaatgcaacagcttttgaaacatccagtttctttcctaagtcatttgattaaaattcacacaagtgatgattacctattccattttctgaaaatacgacatacagtcatgtttcgatcaacaattgaccacatatgacagagatcctataagattataa

SEQ ID NO: 61 - DNA, 425 bp, Homo sapiens
ctgttatgtatctgtgattttatttcttctttgggtatagggttgaggggaaataagttttgagtgagaaataaacgttttagctgaaattgtatcccagaagtttgaaataagtagtagaagagggggaaaacaagggagaagtggtggggaagacttggtagattggggccttaagtaaccacctcctttccctctctgcccccatgacttcctgctccaagttacagaagggaaggaaaccattttactctttttattctgctcattaatgatctgaaagaagaagatggggaaaaggggattccaccacaaggctccaaagaaccaagagtgcaaatcagtccatttcactttcactgtctgagatagggtctctaagaccaggatacaagggtggaatgtagctatatggactcgatttg

SEQ ID NO: 62 - DNA, 418 bp, Homo sapiens
gaaatgtaagtatacagattttaatttatttttaagaataattgtatattttaaaaacaggacacgtactgtatgagtaaacagcgtggctaacaccaagtccacactggtaagcttttgagaaccatttacactatgttgacagtagtactgctgcaggcagacagcggaagaataaataatagtgcttcaagaagagtagtgattgagaggataggtaaagagggcgcctcatcgtggaagctagagcaggaacacctccccagtagtgacatgtgcaaagttccagatctccacgacaaagacagctcaacccactggaacaaacagactcccaatgtggctggcaactgcgggggtagaagaactcaggcaaagtaggcacaggaatgggggagatgagagccaagggacaaac

SEQ ID NO: 63 - DNA, 286 bp, Homo sapiens
caccactaaaaaaggcttttattacaaaatgaattctaataaaaccaggcctggtcttcaacccctcccgctgggtagaggccctagggtgggctagggtaggggagatgggggtggggggccctgaaagaacagagcaggctgccctcctctcatcagtctcagctgctgccctccttttataaagggctagaagagctcttccaaagccccttgagagagtccccatccttccaaccaggatccttccaaccactgctgtcacaggaccttagcaatgccgcat

SEQ ID NO: 64 - DNA, 240 bp, Homo sapiens
tactgctttcttgattttatttcaaaagtacacaaggtcacaaaactagagcaagttgtttttcttaacaaattttgttcttacaaatttcaaaatctgcaccattggatatataagccagaaatcgtacatacaaaatctgaaactgacactgtcagttctatactttgcacacgtgaagtgtcagaatattttcttcagtagtacaggtgtatttatcactaaaattcacaattaggg

SEQ ID NO: 65 - DNA, 434 bp, Homo sapiens
tttgttaaagaatgctttattaatacaaatacacacaaactctgaagcactaagaaatttaaatatctatgtcacagcaaacaggtggcaattcaacatccagggtcgacagaatgcttgaaggagactgcaacagattggattcccatggtggagagggcatcttcacaggtgaaggggggcccagctgaaacagcttttcaagctctctctcctcgtcaaggatcatgagaggcactccactcaaggggaggtgcgcaatctggtgctcttcaggcaggtcaaaactctcaaagtctagaggattgaagggaaagaatttttctatttctggataggcatcatctgaggcaggaacagagctttttgctttaacagtcttctcagtcatctttttggcagaaaagcttggctgtttttgtttgaggggtccc

SEQ ID NO: 66 - DNA, 337 bp, Homo sapiens
ttttaaaaatgtaatactgtttatttaacttcaaaaacatttcagcattctaaacatacaaaaaaataacagaacgttgcgaatcgtgtttaagtacaggaggttcttgaactttcattgatgcagtgactctttgctttgctgacaatgaagagttctatagtttgtttaaaaacaaacagtttaaaaactaccgcacttaaaaaaaaaaaatattctcatgccagctgacccccctttgtccacagctaagatggcagcagaatgctatgtcactatatacagaaacaagacaacctgaagctaaatggatgccccctgcagagtcaacaggtcc

SEQ ID NO: 67 - DNA, 374 bp, Homo sapiens
tttttacaattaagctatttttatttaacatgtaatagtcataaagcaactccatatatttagttttctgatatcctaatgtatttccacaaaccttttaagtctacaattttatatagttttccatcagggaggcaagatatatataatttctttttatatttaactaaaggttttaagagggcttagtctctaaatcagtaacaattagtcataacaccatacaaacacatttaaatattcaggaaagaggttgttaagattattgcttagtcttataaaatggtgaattttaaccaaattgatacctctgtaatcttatttatgtttcctataacatcatactgcttggcaagtaatgtaagttttgacat

SEQ ID NO: 68 - DNA, 277 bp, Homo sapiens
ttttggtaattaacataatttattacgcaaaaaatgagaaaatatacagcaggagggatgaggagtacacataggaaatttctgtgattttcttcattttgatcgtattgctttcttgtcttcaggagggaagatttcgacttcaaaagtaacaaaatatttaagaagagaattcacatctttctgttctaactggtattcttgcatttattttctcagcagtccaggtttctgggaaaagcttatgattattgagaagtgtcaatgcttctacaat

SEQ ID NO: 69 - DNA, 463 bp, Homo sapiens
gagttctcattagactgggttctaggcgggctgctccagctccataaggaagcactcgatgtcgtcatagaggctgttggcgctggacaggcagaggctgaggctgctgctatccagggaagacacaccctcacgctgcgtgccctctaggtgcactcggcacagccagggttccagcttcaccaggaccaggctcttctccttgggcctcccagctgacaggtcctgcccgaagcccaggtagatggtatagcgtggggagccacggcgctgccgtcccggaattccaccagctctcggaagaagactctgaagtcgaagatgggggtgtcacagttccgaggcagcaggcaggctggggtggaggggctggcggactaggggggccgcccacctcccagtacaccttgcacttgcccatgcgccgggggcatagttgtggcccctcaagctccaggtgcaa

SEQ ID NO: 70 - DNA, 413 bp, Homo sapiens
ttttttttttttttttttccaggacgctcacacttagtttttattagccacagtttcccacagttttctacctcctaggaaatacacagctcaccaagggcacccagtcaccattctgtcctgcttgcatggctgacactgttgctcaccgagggtgacaggatctgcaaagtcacccagggcctggtttcctcaggtacagagaaccccaaagaaagaagagccagaacttagagcccctttcttctccatatgggataggacacccaagacaaatgacccatgcatcatgaaacagaggcagggcctaagctgcccaagaggcctgggcacttggagttcctgccaacagccaggccactgaaccattgcctgtccaccctcccacagtgggtaatccctggcctagttgt

SEQ ID NO: 71 - DNA, 404 bp, Homo sapiens
tttgtttctttgaattttatctttatttctccataagggcaatcagagaaatatgctttcctttttaacaagctcatctttaatgtggtagcaaagatggaaggtgcgagaccaaatcttaccaaactagctatttttacaggccaataaagcaacatgcaatccccctcaacaaatttaaataatcaggcaatactaagaatgtatattccattaaactaaaataaacaaggttgaaatgtggtacagaattcactgatgagcctgtgaactccacgtgaggatgtccagtgccttatttatctcagtaaccagagtacccagcacacaagataaaagtgggtattacctaagtggccactattttattaataatgcacataacatatgcttatcattaactc

SEQ ID NO: 72 - DNA, 404 bp, Homo sapiens
tttttttgcatcttaagacaaatattcttttatttctgttaaactgaatatacaattgttccctaggcaaccaacttttgcttataactacaatttaatttcacgttgacaaaacacagtgaaaagacaactttgtgaagatctaattacaataataaataaaataatttatacaagggtttttttttcttgacttttctataggggtcatattcattaaaaagcccaaaaggctacctttgccttaacccttctgtagtacaggaatgattctagatttgtttccttttgttatagaagcaaatattgtttttttaaaatagcctgagatgagaggttatattgtaccccaccagctaacacactaagtggatgacaaactattctctcggtaatttatatag

SEQ ID NO: 73 - DNA, 404 bp, Homo sapiens
cacctacactgtctctgttctctcttccaggaactcctaacattacatattgattgtctatgtcttttttctttctttatatttttctatctatttctttttgctctttatctggagagattccctcaactttattttccagactgtataccaaatacttttagcagtcttattttattttcaaagagatcttcttattctcagtcttctctttcttttcttgctttttaagagacagggtctcactctgtcccccaggctggagtgcagtggcaccatcatggctcactgaagccttgaactcctgggctcaagtgatcttcccacttcagcctcccaagtagctaggaccacaggcacatgccaccatgcttggctaatttttaaaaattattttgtagaga

SEQ ID NO: 74 - DNA, 193 bp, Homo sapiens
tttttttttttttttttttttttttaggaacataaacttttattgtcatccagcacctgtgatagtttcatgtctctctaaaggagacaggaaattggagcattgtgggcccttttaaaagaaaagaggagtaggtaggcacacccaggtgcttctaaaacaaccaagcccaaacctgacatgctcctcccca

SEQ ID NO: 75 - DNA, 406 bp, Homo sapiens
agattttttaaaaattttatacaaatagactaactttgatttaaagtaaacatataaaaattgagaagaatattgcttgcaacaatggacttggaaggagaggaatggattaggcaggggtacaaagaaatggctcctactcggtagttccaggcacatgcccagcactctgcagaactctcacagggacaccctctgctgcaccgtgtccttcagcccacaaagtctgactgattttgtaacaacaacttcaggtcaggaaaaaaacaaatgcaagaaaatcggaaggcacaagcacccatgtgatctagaatgttcttggggtgaggaataaggagggaaagggatacttttggttcagcactacagtcaatttcgccattgttgaagaaaaacggtataaaat

SEQ ID NO: 76 - DNA, 224 bp, Homo sapiens
ttttttttttaagccttatatttttaataaaaaataaacagtctctgacaagcagttttctgaatcccaaaacaaaggaaatttgagggggagaggtgaaggggtcagctagggtaaaggagtgaagaaggctcagattacccctgccattctgccagggcagaagggatcagagtctgccccaactgaagcaagaagaaaggtggtcagacttcaggaaagac

SEQ ID NO: 77 - DNA, 412 bp, Homo sapiens
taagatcaatattcattcttcatttgccctcgtaacgaaaatagatttttaaatgcctcaaatatacaaacatcattgatgcacacacattccagaaatgcagaggtatgctgctgccacggggtaggggtgcgggaggcggcctggcctcatggcgcatgaccgtgccccagcccgggcctggcaggtagctggccactgataaatgccactgggatcctaggagaagctggggaccatgcgtgaggtactgaaggggaccatggtggatggcatcctgggcactttgtagcttgtctgagggaaaggcctctgctgccatagaaaagctggacacatgtcaccctggggccctgacatcctaaaatgccccactgactaccagtcactaggagaaaggtctccggctatg

SEQ ID NO: 78 - DNA, 408 bp, Homo sapiens
ttttttttttttttttttttttttttttttttttttcatttttagaaaaaactttatttacaaaaccacaactcagtctgctttggtattgacaaaatccctacaactgagatattaaagagatacatttattttagagttacataaaaccagaatccaacactaccctactttcctattcctttgtggctctgaatgcagctttaaaaaaacaaaacaaagcaaagcaaagcaaaacaaaacagctctttataatgtacaatggcttaagcaaatcgctttagttttttttctatttaagatttaggacagactactcgtctaaaattcactatttacagagaaggtcctagggaacaggataacttatttaggtttagctctcataatacaatatccataatggct

SEQ ID NO: 79 - DNA, 308 bp, Homo sapiens
ttttttttttttttttttttttttttttttttttttttttttacatcccaaacaggtctttttatttaacataaggccaaagaagctatcaggcgttgctgaatactgtccactaactgtacaaaatattgactgcatgcctcgcaaacaccaaaatatccgctggaatgccatagaaataaataacttctgctataaacacatgaaaacatatcaaactgttatctctttaaacatattgtaaataaaaaaattaccagtacttctacacaataaatattaagaaaccattgacatagttgaaatgc

SEQ ID NO: 80 - DNA, 365 bp, Homo sapiens
ttacttttagaattttattgacttttttcttcataactttaaaacaaaaacagcgcatgaaaaccagtgtcttattccaaagtctcaactcagctgattgccaggtgaacatcaccatcttactcctctgaataactagacacaaattacatagcaagttcgtgtttctgcccacccaagacacagccagtaatcagtcacaaacacagacacagccaactccaggggctccagctttctgcccatcttctctcagcagttcctcccatctgctaagatgcgccttcctggtggctctctctcaaggtgggtcaaggctgaacaagacagaaaagcacagtctaggtccaccatcacctcccact

SEQ ID NO: 81 - DNA, 383 bp, Homo sapiens
tttgaacataaaaattctttatttaacctaatccagccagtattgagatagtttgctatattaaaaacaagacgtttaaaaaaattacagcaaagttagcaaggcagtgactaattaagtcactaagtttaattttatattcttcacagtcatttcataatcatgtaatggtaaacaatattttcagccactttggagataagttaacttttgaaaagaatagaattctagtagtcgtcattgaattttataaaagaggtttaaaacattaaagtttccagaaataacacagtaaagaaatatgaaaataaactggaaaataaaatatacccacccatccgaaaaatctacatcatctctttcatttgtccccaatgcctttc

SEQ ID NO: 82 - DNA, 386 bp, Homo sapiens
tttttgaccatctccaaatggttctttattgaacacccactttggctaggcaatatcctccccctgccctctaatccaggctcaggtacccccagtggagtatcctcagaaggcaactcccaagaccaggagtaatgagagattgggcagagggtaagggacagcagggagacggaggaaaatgaagacaccagggaaagaggagaggcctgaactggacagctgatgctttgtcctgcccagcacccattcgtcccttcttcaggtaatatcatctgccaccacaaccaccagcaccaactctcagtctctgtgggtacatgccaggcctgtccatttggtgtattccatcttcctggccacaatgatgacttgaggctggatac

SEQ ID NO: 83 - DNA, 284 bp, Homo sapiens
aagaagaaaaggctgtaattttattttcaaatttttggaagtttttcagaaaaaaataaaatgacaagaacacatacaaatattgaaattattcattgaactataaacacttagcagaggaagggacttttgatgtatttgaatccacctccttctgaaagcaggaatcacttctaaatgtctctcatatctttcttcaaggagtggttttccaggaggttcccagcctcctcaaatctttcccaagtttgatgcacttcacctcataaaaataatatatatat

SEQ ID NO: 84 - DNA, 355 bp, Homo sapiens
  misc_feature (1)...(355): n=a,t,g or c
acaattctccgcagattttattaattataactttttttttcagacgtcctgccatcttctcattcagacttttcttagcaaaggtagtccatggcaagtaatgaattcccagtaactaggtctgtaacagaagtaaattctgtttttatgtttataaactcaaaaagtaacatgaagtgcaaacacctttagttccttcccctcggtaaccttcttttgatgaaccagtgtgcagcaaaccaggatgaagttggatttgggtgggatccacacaggtcattttcaggcaagatgagacttcccaagttccatgnatagattcatattatcagttattttatgcattcatttctcc

SEQ ID NO: 85 - DNA, 429 bp, Homo sapiens
  misc_feature (1)...(429): n=a,t,g or c
aganaattnnttttattcagcctgatatagatcatttatgaaaaactaacagcaaacatcatcctcaatggtaaaaggctgaaggatttttctctaaggttaggaacaaggcaaatgcctgctcttgccactctattcagcatagtgctgggagttctagacagagcagttaggcaaggaaaaggaaatctaagggcatccaaattgggaaagggagggaaggtaaaattatctctgtttggccaatggatatggattttatatggtatggaataggaaaacccttaaaggattccncccaggggccnggggncggggtgggcctcacggcctttttaattccccagcactttggggggaggggcccagggtgggggnggggtttgctttgagggnccaggggggtttccaggacttggccgggggggg

SEQ ID NO: 86 - DNA, 331 bp, Homo sapiens
tttttttttgatggtggttgtctctaatatttatttgtctggttataaaattaatatgtgaggagcattggatttggtgagaacgttttgaaccctagctgtcacgtgccacctgcgggatctagaccagtgacttctcagaactgccatttcctcatctggtagacaggatggtaagccctgtcttgctcactccacgtatgggcagtgcagatgaaatgagatcacagaggggaagcaattggcaggctggaaagtgctgacaaatggaaggggttgtgtcaccaccctcagctgaggtagtaccaaggtccaagctcctgcccctccc

SEQ ID NO: 87 - DNA, 417 bp, Homo sapiens
  misc_feature (1)...(417): n=a,t,g or c
gtaaacactttgctttggttctgtgtctatactggcatctcaggagagtgagatatccagacctgatcttcagaagcactatgagccagtatccatcggcgccactgatgagttccagagtgaggacagtgctcacagctagaactgaccgtccccacacttcatctccctccagggntctcctgctgacaccaggggctcctcaaaattactccttccttcacacatgggtgacaagggttctcaaaaagaacacctgggcagagatgcccactacaggcaatgcttgtgggtgggcaagaagcataaaagaaccccaatgtnccaacaccaggggaatgggattaangccagggggttacccatttgtaaacaaaaacaacttccaaaacccaaccggttaaacngggggaggtt

SEQ ID NO: 88 - DNA, 412 bp, Homo sapiens
ttaaatgtataaccttaaatatttatttgagaaaacaaataaagatccaaatacgtgagttgatcatctgataaaagtaagagttgacaaaaaaggtacatcttctccaatccgaaaacagaaagtgggaaagatcaaggtatcactagaggtcaatgaaacaaaacatacaatagtggatgacaaaagccaatctctgaatctttgaaaagaatataataaatgaacatctgaaaccagtgatcgagaaatgttttagataaggcacaaaaagataccaagaatgttaacactaggctgtacatcctaaaacagtcagatgagctcactgttataattctggttcaccgcaagaaccttagcacaaagaaaggactcaacaaacatttggatccatgaataaaattatctt

SEQ ID NO: 89 - DNA, 289 bp, Homo sapiens
ttttcagtcacagaatgttttattttaaacttactgtaaaactttcaaatacaacacatgtggcaaagaaacaacagttcacacacaacatctgccacaattctctttgaactgccatttctattatgtgatattttacaatttctttcaatttcttacattcatggtattcttaaaggcagcaatgtcaatttttctgctttgaaaatagttcagttaatgttctgaaattgcttaacatgacattttccttttagtattctactgctgcccacactgacataattca

SEQ ID NO: 90 - DNA, 398 bp, Homo sapiens
ttacaaaagaaaacacaaaaccagaatttattgaaagtaggtaccagctctgattagaacaatcagctcaaagataccattactcagaacaatatatacaaaaatctcagggaaaggagaataaaagaacttaaaagaatacaacttgaacaggactgttttactaaaatggtcttgttgcaaaataataacaaataccacagagagccctacatgagaaagccatgtgccttcaagcctggggatgaggactctagttctcaaattcttagaacatagcacatgattctccaggcagagaggctggctggagaatgaggacctcactgctgactctgcttaacaaagtccatgccccaggcacaggcacacatggaatgaggccaccaagcaagtca

SEQ ID NO: 91 - DNA, 401 bp, Homo sapiens
ttttttttgctgccagctgcatttattgtagcatgtacaaaccactcacagccagcgcctgtcaggggcccaggacactggccagcggggccaaggagccacattgctgggcacatgccccataccctggccacccggcagcagtgcccagcatccctcaatgacagagcagccaggaccccagcggtgactgtcccagaggacctacaggggcatggggccaaagctgggtcctgcaccttgtttggcctgcagatttgatttctgaattaatttctgccaacaacttaaaaaatcaggacatctcacatacaaatctgtatttctggcttctccagatttctgtcattaggcctgcattcccacaccagagcaattagctacacctgaatatggcagcg

SEQ ID NO: 92 - DNA, 421 bp, Homo sapiens
tcatctttttgttcactaattaatttagctgtgatacttggagtatctgacactctgtcaagaacatctgataatgttgttgagactggcaaatgaagagtacggaatttgtggcctgctccatacattggatgctggatgacgtggctagtagcattaattctacctttgtacagtggacatggagactgaagaaacattgtcactttctcatcttccagcatcaactgtaaaaataatcttcgtataaaccctgaaatgttcccagatgttggaaggttccctctttgaggagatgtctgaaatagttcacaaagaacctgtgccatcagcttttgattattaggatggcatgaaatgcactgtagaaagaacgcaacagttgcattctcaattgctgtgcgctgttgagtagtcagtc

SEQ ID NO: 93 - DNA, 108 bp, Homo sapiens
gatctgacgttttctacgtagcttttgtattttttttttaaatttgaagaaacactgatgaagccctgccatacccctcccgagtctaataaaacgtataatcacaaa

SEQ ID NO: 94 - DNA, 407 bp, Homo sapiens
  misc_feature (1)...(407): n=a,t,g or c
tagagacggggtgtcaccatgttggccaggctggnctcaaactcctgacctcaggtgatccgcatgcctcagcttcccaaagcattgtcttttattttntattgttattttntcaacatctaagtatttattaaggtgagtttttacaaacaagcatctatcccagtgtgcggggtgaggatgggagaggagagtggggcagcaggaagatgaggattctcatcttttgataataaagctccagggttcancccattgtggatttcatagtcccccagagacacatgggccttaaaaattgtgtaccacttcttcaggacaatcttgttccaacggggtgccagtttagggctgcaatcagcttcttaagggtccccgatgggnatcanccctgttggcatttaacg

SEQ ID NO: 95 - DNA, 447 bp, Homo sapiens
  misc_feature (1)...(447): n=a,t,g or c
gtgattaacaggacttttattggtagtaaactagagcaaacaatcagaataatacatatgcagtattcagtacacacaataaaagttaaagaaattcaaaacctgtataaaacaaactggagaaaaatcatacagcttaagagatacagtggtaaaggtcctctccatcctttgattacagcttgtactctgtactcaatagaacttaccgcacttactgaaataagaaataaacactttttagtactcagcgtatttaagattaagtacattttctaagaatcttgcaatgacaagttggtgaccctttagctgctaaagctaaagggaggaaagtgggaaaaggaaattaactaatactttgtaaccatttttaatatttcntattttccaaacactgcttttataacagaagtgttttacacttggcacaatattaattacttg

SEQ ID NO: 96 - DNA, 210 bp, Homo sapiens
ctcaaaaacatcttttattgattttgtggcaagtactccacagtcaataactcgcacatctgcatatggtctgcttgcagcatcggtcttcagattttcaatttgttcgattacttcaaaaccagaaataaccagtccaaagactacatgcaccccatccaggtgtggagcaggctttgtggtactatgtaataaacatcaacacaaaga

SEQ ID NO: 97 - DNA, 441 bp, Homo sapiens
ttttttttgttttctacagcaccaaagaaattcaaataggaaaaggagagttgagaattgggaatcaagaatcagccctgtttccatcttagccacaccaacttatatctttatgattttcaaagcttttgccatgtgattctgcccccacaaaggcatcggtatttcctaaatggtacctgtatatgcagcgttgttttctataccatccttattcaaaacttgcatgtggcacaaaatgggttggtgggcaccaaggtatattttctgttgatttgatatgttctttgtcttaatcttaggccaaggaaaacaaacagggaccaacttcaaatccgaacttctggattctgatcaccaaaggtcattgatccatggacatcaacataggggacttggatcaatttttgggggtattggatttccatggacagttttttt

SEQ ID NO: 98 - DNA, 488 bp, Homo sapiens
tttttaaaacttttaactaaaaagtaaactttaatgtcgaaagtgcaaacttggggaaggcagaaaacatcacacacaaggctgtcacttcacacttggaaggttgcacagcggccgggcagaggcgctcctcacttgccagacggggtggcggccaggcagaggtgctcctcactttccacacggtgtgggggccgggcagaggtgcttctcagttcccagatggtgctgggctgtcggactccattgctggatgtgtgacttgggtttaagcttctcccttctgctctcatctggaaatgctgacagcctgggcatttcctcctttggcactggagactgaagcctggcaaggcctgccctcagcaggaactccccctgggccccactctgtgaccttgagcccaagacaggatttttcctttaccttcttccagccactttgggcctcccggctctctcagaagccctgttaggtaggtgacaac

SEQ ID NO: 99 - DNA, 484 bp, Homo sapiens
ttttttttttttttttaaatgcaacatacaaactttattgaacaaaagtaaactgtttcagtaaactcaaacaggcacttaagagaaaaactgactggaagaacttttatcttaaacatcttacagtaacctacttgcagttgcatttaactgagctctgttgctgtgaagaatacagctcatgcacaggtatggatgaaagatttgtacatttctcaagtattcactgaatactaccttatatacacatatacattaaatttgaaaaagatttgacgatccccagataaacttcatttttgttgatcttttggaagaggtcgtctaaagagaagaatatgtggttctggctcatgaatcatggtaatgaacccagcctagactctgttggacaccaagtctcctccactcctcttcagacatcagatgagttttaggtacttgtttggaaagttctctggggtaacataacatgccggtacta

SEQ ID NO: 100 - DNA, 401 bp, Homo sapiens
ttttttttttttttcccgcagtcacaaaccattttattacccacattgtgctgtgacagggaggggtctccaatgaagaggacctagcactggaaggtgatagccccagaagagaagaggcttctttctcactgtgaggcagaaacaaatttatctgtatgtaaacttttccagtaatgggtgatgctgtgacacctgcagaaagcagcctccctctgttactactataaacacccattctgcaggcagtgtgagggcacagccttctggagtgccacacctgggtaccacggcacactggtgcatcccgggaagatgttcctagggcaccacatcttgggtaccaagaggactgtgtgcatccaattagaccgaggtgcaaaagccaatgcgtcaacatc

SEQ ID NO: 101 - DNA, 533 bp, Homo sapiens
ttttttttttttttttttttttttttggagtttaaaaatcctttattaaaaaaccccaaacggaaatgttccaaaaaaaataaacacgtttctattaacatatcccattaatcctattagttggaataagatttaaagcccaatttggaaaagcttgcagaatttcttcggaaattcctaaaaattacggtaggcaaaaacttacaaaaacatatgctatcccagggcggggaaaggaaaaaaggggaaggggctacaaaggccccgggggcatcacctgcccacctgggacccaggggtccgggaaactgtcccgtaacgggaaacctaccgggatgtaaaggtccataagttacaaggcttttttggtttaaaaaaaaaaaaaggtctgtactttccaggccaaaggtgaaatggcccaaacaccccttaacgctttcaggtcccccaggccctccattggggtgggaccccctaggaacaatttcggggtacaaactttcccggaatttaggcggaaactgtccgggaaa

SEQ ID NO: 102 - DNA, 339 bp, Homo sapiens
cctttctttcctttagaagaagtagatgaacgagacgatgcagcagactgggctcctgatgaatgctgggaggtaacatccacagaggaaggatcataggcagactttctgttagaatggtcctcctgagggcttaaagtgctatgaggttcaagagttgattttttttctgtcgaagtcccagtccctggagaggagacaaaatcatcttcatatgaaacaccacttagaggagttgcggtggcattcaaaggccgtgatgttgatgttcctctgtccaacttgtcttcaaacccttttccatataactgataggattttgtaaaaatattaatgacg

SEQ ID NO: 103 - DNA, 346 bp, Homo sapiens
ttgttttttttttgtcttttttttttcttttccatttcgttgaaatatttacagcaatggggaaggaggaggagagaggaaggagtaagagggccccctagggaaagatccaagcccaggacccactccccagggagatccagacccaaaatctgctccccagatagccgagcccacaggactgggaactgcccaaatatggccacccctgtgggctgggggccctgcggggaagttgtgcttcatcaggagtcgccccaagggagggggtcattgggtgcactgggaggcagagggggcaggtttgcttgcggggcagggaccaagagcaaggggaaaggagctt

SEQ ID NO: 104 - DNA, 384 bp, Homo sapiens
ccgtgtcacttctcacttctaaatagctctagacttggtcccattgcactaacttaattcactctccatcatctttggcttggagtacaactccgtccttccatctaatctgcctgtctccaatcgttctcccctttgatgtgcagggcagccactgatctctctaacatttacagaagaatgcaccacttgggttgtttaaaacccttcaatggcttcccattgccccaagttcaaactctgcaatgtggcctacacatctctctagcttcacctcctgctcaatatcctacagcacagtgaagttcttggtggtcctcaaaagggccctcaaacttcaaacattcccttcaacctaaaatcctcaatggacattactgagtc

SEQ ID NO: 105 - DNA, 494 bp, Homo sapiens
ttattttttttttttttttttttttcaggatttggtatgttttattagagcaaatttttaacaaaaggtggctttcatttacagaatttaatgtgtgtggggactgtccaacccatgtggactcaagtaaggataaccattaagcttgctaatgtattttcttattttcagtttacatacaaattttttttgtttgcttcacattcataaaaaccccaatactgtaaatgacaaataacccctcccatcccttaattaaatatacaaacagcctgaaaacatacaatttaaattggtttaatcttgaagtgtaatccaataagactgaaaactaaacatttcaagtcttgtaccaaatagtaaaatactcgaaggccttcaggatcctttgacggatttacatcaataagagaacctatttttgatgtggtaaaagatatgtggctctctccaattacattttcaagctcctgtcggccaacccttttaggggg

SEQ ID NO: 106 - DNA, 241 bp, Homo sapiens
ccagttttgtccaaaataatttatttaccagccttacaaaaaacatgtcggcaagagaagaatcagtcccgtaggagcaggcaaacctctccttccttccggtggctcccctaggacctgccggagagtggagagtccggtgggggggtcccaagcccagggtggacgaggaaaaggtcaggaaatagaggattgtcctgagccctcctggccatgggggccgacccagtgggcactgagg

SEQ ID NO: 107 - DNA, 403 bp, Homo sapiens
tttttttggctgttaaaacgttcacccccacaaaaggggagtggacagatttattgaaatcaaactgggaaaggagcagctggacggctggactctgggcccagcccaggccccgtctgcccaggatgggcccttgcagagagggaggagaggcatggggcctgcagctgcccacaaggaagcgcccttggttacttccacggtggggggcctcttggaaacctccaatctggaaagaaaaccaagggccaaagtcacatggacagggccagagaaagggactggggaggtggaaagcaggcagaagcaggctcaggagcccgcagtgagttaaactgtgcttctcaaggcggcctggggggtgtgggtgggggctgccagccttgcagggggcctaggctgg

SEQ ID NO: 108 - DNA, 253 bp, Homo sapiens
taactcccagtcaccctgttttatttcaaccatggagaaaagtacagaggaaaggctgcatatggagagactgtcgggctgacggtgtcacagcagatccgagtccacgtgtggaaacagcagccgcccggccctgggtgtttcctccaggaaaggcctggtcagtgaatgcctgcaggcagcagggtgtcaggaatcacctgcccgatgccagcgctgctcttgtctggagggccagactgtcatgaagtca

SEQ ID NO: 109 - DNA, 118 bp, Homo sapiens
tttttttttttttttttgccacacacagcactgggtggacttttattttaaagtcaaaggcacagcctggctgggctgaggcagtgaccatggatgcccagcccagacccccaaggcc

SEQ ID NO: 110 - DNA, 382 bp, Homo sapiens
aattcttttttagctcattggctatccttagcgtacattatgtatggcccaacacaattcttcttccactgtagcccagggaagccaaaagattggacactcttgttttaaatagactatctttttacccttttatttgttccaactcaggataaatatccaagtatctagagggtctatgtgtgctatctatacaataaaagatagttatataaaaatgaagagttctccataccattatataaacaggaggttttacaggcattagtgatactctgttggactcaatgggtttttttctctcttatagctatgaaagactttatgccagtccaaaatatacaatgttgaaagacaggttttgaaataaatattctcccca

SEQ ID NO: 111 - DNA, 519 bp, Homo sapiens
tttttttttaatggtttggactgcaaactagtacttaggctttcagcaacttggcagtgtttgtctgatgcagatactgcacccagttttaaaaaaggcttattactaaataaactagtgaagttaacaactgaaggagtaatagtatgaatgctggattcagaagtcaaacttggcttttttccaagggaagagcttattcttggaatatctatatgggtagtttttgaatcatttacctctttatcaatccctttacattcaatacttatactatgaccaactgacctatgaccaacgttcaagtgggtactttcagaagtaaactggttctttccaacagattcagaaatttcttcgattagttctgtagtagaacttaaaagtaatggattaggagccaactgtgaagaagtttcagggggacttctggttaaaggattaacagatacagtaggtgatggggaagggaagatgctttccccaagtgcccgaaggggattaggggtaaatacccca

SEQ ID NO: 112 - DNA, 347 bp, Homo sapiens
  misc_feature (1)...(347): n=a,t,g or c
gacacgkgcacntctttattggaaaagaataaagcagtcacngatgtggcaggggcaggacacgagcagctgccgtccyccycccagsgtgcctggcatggtcgcaggggagcgggtbcctggagtcccggtgacaccacggggcacactgagggagctgaggagccggggccgcgcasctcctggdtgctcagcggatcgtgtacttktcccacttcttttcagggtcgtagggttcccagcggctggcgggaaagatgtgcttkttcttctcgtaccagctcctcagcaccaccttgcctgcatgggrctcatccttctccacagtgggsgtcactgagcaaccg

SEQ ID NO: 113 - DNA, 387 bp, Homo sapiens
  misc_feature (1)...(387): n=a,t,g or c
atctttctctttattctgacaacattatgacattaaataaaanccaagnggtattggattagnccttgtttggnctctggngatttagataaggcagaactgagcccctcggaatgtattatctcaaagngctagtagcagctgctatgcaaagttctaaggcccgagtcaaatcctgggcatctccacagatgtgtggtagggcacgggctccagctcttgtgtaagaaagancaggantgagancagctttattttgtaggcgccaaggtctcactatgctcacacctgtaatcccagctttgagaagaggatctgggcaccagaagggtctgggtaggaaggaaagtggggaaagggtgaaggncagggaatcttttcccttct

SEQ ID NO: 114 - DNA, 353 bp, Homo sapiens
  misc_feature (1)...(353): n=a,t,g or c
aaacatgtttattagaaaagtaaaaaatattgcataggncttaatacttgaacatcaagtgtattcatgaacagtgagtatcttancttcatgtaaacagtnctagatggaagacccagatggcactcctcccggggngggntnccagcccccaccctctcagcccctcccctgccagctcaactctgcagtacacgatgggggaaggcttaaacgcagctgccagggggtaatttttcaagtgtcaaagancccaagtgatccctgnacacccaccccttcctactcttacattcatgcggtctgtaagataggctgcctacaacagggtcagtaggngatggctccgatcc

SEQ ID NO: 115 - DNA, 195 bp, Homo sapiens
  misc_feature (1)...(195): n=a,t,g or c
cataatacatatatttattgccatcagagttctgcaattctcataaaattagagtcagatggaattcagggacacgtgcaagttttggaaatggacacagataacagtatagaactgtacacaaaataattaccatttattaaacacactggtttagnacaccctggatggatgagaatgngcnccataattttt

SEQ ID NO: 116 - DNA, 437 bp, Homo sapiens
  misc_feature (1)...(437): n=a,t,g or c
cataatgctaatgcaagagggcttgaagtatcaaagagtccacaggaaatggatgcccccagtaatatcttttttttaaaaaaaatatacattatataatatatattatatatataanangctagtgtaaatgcttccatggtgtggtcacaaatttgaaagatgaacctcctttcagctgttaaccatcttcccatttgcaacaggttttaaaaagtcgtttttatcttccnacataacatgnntttncntaatgaggttgccagcactgacagatgtggtgatggggaggcaacttgcattgctaatagacactgggagtggctggctaaagcaagaagttaccggcagaattgttttttgctcctccagaatcacatggtcttcacctaaactctgtttcttctgctttggtggctccntttggtgcngctgga

SEQ ID NO: 117 - DNA, 366 bp, Homo sapiens
  misc_feature (1)...(366): n=a,t,g or c
ttttgagagctgatgacagacaacagcaagctactttacagaatctaccaactgggtaggaaagtcttctgagtttctttgcagacaagaaaagttacctgttgattgttggccaatcaataagggactttcctctctgccattaagagcaacgatgctgaccacatactctgtgcctggagtgaggttggtgagggtgatggaattccgagagtggggcacccgatcttctcgaggtctcccactgaagtgctcgggatgatggcggatcctgtagccagtgatggtggctcgaggagcaatccagtgcacagtaaaagagttggcagtaatatccagaaaagtcaatacccatttggggantca

SEQ ID NO: 118 - DNA, 295 bp, Homo sapiens
  misc_feature (1)...(295): n=a,t,g or c
ttttttttttttttttttttttttctgagatggttctcgctacgttgcctaggctgtagcgcagaagctatacacaggcatganggcagcacactacagtctccaattcctgggctcaagtggtccttctgcttcacctcctgagtagctgggactacagggacgtgccaccccacctggcatgatacctatttcacagantctgttactatagaaaaacagctctcctactcacttttttcttgtaaaattgtataacattattaggcaaaactgggagantacaanttttaaa

SEQ ID NO: 119 - DNA, 344 bp, Homo sapiens
  misc_feature (1)...(344): n=a,t,g or c
ttggatacccaagaattaattttagaatttaaatttggctttagtatcagtaagtacggatatcacatcctcagaaccaaaaacgaacaactcattttcttctttcaggaaattaaaagctacaaaggcaaaaagagggttgaggatatatgaatataacaacttttaactagctgactaattaaagagaggattagcaaagataattgaagtctacttataatttcaaatttccattttgaaaaagttttatttttaattcaaagaggattaaaataagggngccaaaactgatatggaatttcaaatactctttctctgcccaatggatccanaaccaatta

SEQ ID NO: 120 - DNA, 382 bp, Homo sapiens
  misc_feature (1)...(382): n=a,t,g or c
tttttntangaaatgacaagtaccgtttattgtcgttacacaaatgaacccagcctctggcttgggcaccgtcccacggaccagcagatgagcatggtcagccgacccctttccccacccccgagtcatgtgcagtcatacantccagggagaaagtcgcagtntcgantaccggacacaggttcccttggnttggtggngcatctntgatccacagantggcccacctntcggagtggccaacggagtcgntgaaacgttgtcaaataagncaagtaagtgcaggagccctggggntggggggcctntggcttntgncagccgggtggggaggagggatntccaaggtttctgcggggtagggcctcggcttccanacctc

SEQ ID NO: 121 - DNA, 404 bp, Homo sapiens
tttctaattgagcaactttattcacataatttctacaccaagaactcgaggttatctctgatggaaccaatttcactaatatttactttaagggcagagaagtcaaccaagtcctcacagtctcaagaatcaaaaacaaaacaaaaatacaaacagagagcaagtgggaagataaataacactccgaaataacctagctacacacttttagtttccaatttttctagcatgaaatcacttttctcttccatcctgtaagacgtgttctctcctctctcttctgagttgggctgtgaagagctgccctgggtctcccgggtctgacgggtgttgtccaccccatctgagggcacccaggggaattgccctgggggtccggagccctgggggtttctggatagcct

SEQ ID NO: 122 - DNA, 431 bp, Homo sapiens
  misc_feature (1)...(431): n=a,t,g or c
aaccggatgtctcagactgtaagcgaaggacaaatttgtgagatttggggtctatgaactcttcagagagtatgatgaatggaattttcttcacattgactacgaggctgaagtccaagcacttaaggacgaacacaattccatcccgtaatccattagtcacagcctcatcactgacaagcctccactgtgtagagagccagcggnccttgtcatattgcagggtggggcccgcactgaggtaccgttctaggnaggccttgggggtcatgccngttggtgatgcagaaggccagggtgctgcaggatgctctcccatgctgtgggtagttctgctgccggggtnatgcgcaggtacttctnggagagccctgggccatnggaggggaaaattgcctngggcngcctccctagggtccntcactncccta

SEQ ID NO: 123 - DNA, 3323 bp, Homo sapiens
tagtggtgggtaagaaaattggaagtattccctcctcatttggtgggttggtggctgggaatatctgttcccttggaaatgtttgatgctactctgaaagatcgagaactgagctttcagtcggctccaaggtactaccatgtttctgcattggctagtgggaatggtatatgtcttctactttgcctccttcattctactactgagagaggtacttcgacctggtgtcctgtggtttctaaggaatttgaatgatccagatttcaatccagtacaggaaatgatccatttgccaatatataggcatctccgaagatttattttgtcagtgattgtctttggctccattgtcctcctgatgctttggcttcctatacgtataattaagagtgtgctgcctaattttcttccatacaatgtcatgctctacagtgatgctccagtgagtgaactgtccctcgagctgcttctgcttcaggttgtcttgccagcattactcgaacagggacacacgaagcagtggctgaaggggctggtgcgagcgtggactgtgaccgccggatacttgctggatcttcattcttatttattgggagaccaggaagaaaatgaaaacagtgcaaatcaacaagttaacaataatcagcatgctcgaaataacaacgctattcctgtggtgggagaaggccttcatgcagcccaccaagccatactccagcagggagggcctgttggttttcagctttaccgccgacctttaaattttccactcaggatatttctgttgattgtcttcatgtgtataacattactgattgccagcctcatctgccttactttaccagtatttgctggccgttggttaatgtcgttttggacggggactgccaaaatccatgagctctacacagctgcttgtggtctctatgtttgctggctaaccataagggctgtgacggtgatggtggcatggatgcctcagggacgcagagtgatcttccagaaggttaaagagtggtctctcatgatcatgaagactttgatagttgcggtgctgttggctggagttgtccctctccttctggggctcctgtttgagctggtcattgtggctcccctgagggttcccttggatcagactcctcttttttatccatggcaggactgggcacttggagtcctgcatgccaaaatcattgcagctataacattgatgggtcctcagtggtggttgaaaactgtaattgaacaggtttacgcaaatggcatccggaacattgaccttcactatattgttcgtaaactggcagctcccgtgatctctgtgctgttgctttccctgtgtgtaccttatgtcatagcttctggtgttgttcctttactaggtgttactgcggaaatgcaaaacttagtccatcggcggatttatccatttttactgatggtcgtggtattgatggcaattttgtccttccaagtccgccagtttaagcgcctttatgaacatattaaaaatgacaagtaccttgtgggtcaacgactcgtgaactacgaacggaaatctggcaaacaaggctcatctccaccacctccacagtcatcccaagaataaagtagttgtctcaacaacttgaccttcccctttacatgtccttttttgtggacttctctctttggagatttttcccagtgatctctcagcgttgtttttaagttaaatgtatttgacttgtgttctcagcattcagagagcagcggtgtaagattctgctgttctccctggatcttctgacattactgctgtctgagatttgtatatgtgtaaatacaagttccttgataccctaaaaccttggattaaacagaatgtgcattgtacatctttaaacaaaatgtatattaatttattaaatctagttgtcactttattttggacctgctgtgatctcgacaggaaacgtgccacagagcagtagtgcgcaggcaagacttttcagtgacgccttgtggaacgcagttcatgatgtcctagcagctctcactaagggaactgtacattctttctttcttggctattcagaccttaccaagaacgttaaaggaaacaagtagaaatcagcagtggagtgtctgtggtaagaaaacatgaactttatgcttcactgttagttgtttgtggaagttattttgtataacaccaaagctgttgtacatttcctactgcctgatttttttcatgtgtctgtgtttgtaatattgtatagtatcttgtgctaggtgaggaaattattttttaattttgataatttaatattcctagtgtgatcagcattgggagttgggtttcagtggggcatgtctatacttagagaaaaaaagtcccaatgaagattttcatgagtcagcccccccgcccgcccccaccccacacccacatcctctcttttccacacacaactatctgtttattttttgtagcagtggccgaaagtcctgcaaggtcataaatctttcagagtgacatcaccaactgtactgcatcttactggatttaggacttctgagatgcttgtgaagtatagatgtggttgtggtcttagattgacagcattagagaagactggttagaacatctggtctcgctggttagtgcctcgttggctgaggactaggtgtgcatttctcctagcttttcatcaggaaatcccaaagtttccaaagctttttgtttacagaataaaacttcaaataaaaccaattcattatttgtccagaaggaagcttggctgagctggccttttaacataggaatgtatttcgttggaaacattctgaaaaatctcagagaactgaacccttacaaactttgttttccctcataaccaaagcttcaggttagaagtttagaaaaatagaatggttgggtacatgatctaaatgtttaatgctaaaggtatatcgtaagggtagtgtttgtttttgaacgataatttagaagttctcatagaaagcgtataacataggtcttcagaaactataaaagaattttcatatagtattaaaatccatagactaaaatctgagaattttttaacatatgcaagtcagccaaacataagctaccaaaataaagagcaatgtgttctggctgttttatacttcaacaattttttccctaagtggtaagcaattactttaaaacatatttttaaaaacatcggtatcgggagctgcggtggctccggccggttgtcctggcacacaaggaggcgaggctatgcgttcgaggccaacctaggcaaaattggaaaaaaaaaaaaaaa

SEQ ID NO: 124 - DNA, 18596 bp, Homo sapiens
cctgtagtcccagctacgcgagaggctgaggcagcagaattacttgaacccaggaggcggaggttgcagtgagccgagatcgcgccactgcactccagcctgggtgagagagcgagactctgtctcaaaaaaaaaaaaaaaagaccgccagggctcaaacaaaaaacctcggaaaagccctggcggtcttttttttttttttttttttttttttttgggacagtcttgctctgtcgcccaggctggagtacaatggtcggatcttggctcactgcaacctctgcctcccaggttcaagcaattcttctgcctcagcctcccaagtagccaccacgcccagctaatttttgtacttttagtagagacgggggtttcaccatgttgtccaggctggtcttgaactcctgacctcaggtgatccacccgcctcggccccccaaagtactaggattacaggcgtgagccaccgcgtccagcgccctggcggtttttaatcaagtagaaaagctgcattataccacttgcttcggttgcttcagtgagaacgaagaaatggaaatgcaaatcccttattagttgtaggaaacagatctcaaacagcagttttgttgacaagaccgcaggaaaacgtgggaactgtgctgctggcttagagaaggcgcggtcgaccagacggttcccaaagggcgcagtccttcccagccaccgcacctgcatccaggttcccgggtttcctaagactctcagctgtggccctgggctccgttctgtgccacacccgtggctcctgcgtttccccctggcgcacgctctctagagcgggggccgccgcgaccccgccgagcaggaagaggcggagcgcgggacggccgcgggaaaaggcgcgcggaaggggtcctgccaccgcgccacttggcctgcctccgtcccgccgcgccacttggcctgcctccgtcccgccgcgccacttcgcctgcctccgtcccccgcccgccgcgccatgcctgtggccggctcggagctgccgcgccggcccttgccccccgccgcacaggagcgggacgccgagccgcgtccgccgcacggggagctgcagtacctggggcagatccaacacatcctccgctgcggcgtcaggaaggacgaccgcacgggcaccggcaccctgtcggtattcggcatgcaggcgcgctacagcctgagaggtgacgccgcgggcccctgcgggacgggtggcgggaaggagggaggcgcggctggggagagcgctcgggagctgccgggcgctgcggaccccgtttagtcctaacctcaatcctgccagggaggggacgcatcgtcctcctcgccttacagacgccgaaacggagggtcccattagggacgtgactggcgcgggcaacacacacagcagcgacagccgggaggtaagccgcgtcccagcggctccgcggccgggctcgcagtcgccccagtgatgccgtggcccccgaggcgggcgtcatcgggcagcgtttgcccagtgctggagggttagggagagctgcctgggcttgaccgcgcgccggtctcaaagtcctggctttggcccctcctccgttttcccctgtggaccattccgcttcgcagcgttttcaaaaactggagcgaaagtgatgtgggcggggcaaaggcggcgggaagaggacagcactgaagctggcgcgggaacttggtttcctggtggcctcccatccaatccccacgaaccagctttcctcttaaaccttgaaaagagaaattcgggagttcgagttcttagtcgtcctttcctctttcctttccgacaggagcaccccaggcaaaaaatgtctcgcgggtcattggcgccaggctttcaggggacagtggggcggggcggggtgggcacaggacgttaggcagccgttggccctccctaaggccacaccgtcctgccgtcctggatcctgcgccagctgcgcgggggaggggactcgaaggtgtgtgagccaggggctgaccttgaccgctcagataaatggagcgcagccttgacacaggggtggaggtggttttgaatggggaaacccattcgtggtgaagcagattcactgtagctagcggaaaagccctccggcccacggacccatctagagacgaatacatagcagctgctgtggctgattggcgtgggacagcgtggggagttttgtctgaggagagggatccacttttctgcagctccaagcccaggggcctttgatgagccatagacctcatttttaacccacctttctgcttagacattgagcaagttacttctcatatagcttccctatatgttaaaaatggagaaaataatgcttagtaggcaattctgataaaagcaggtgcttgcaaaaatctctctgttgtctgaatataaactgtaccacaagcgagtgcggatgaacgaggactgcatttaaagataagtttttacactttcatttctctgtggctcgacacttctgatgcctccctttttgttcctgggacacatgcttggtgttgtcttcacacctttgtgacaggattagcactagtgggcagtggatgatagctcctcctcccttttgccacatgttcatccctgccctcgccaccatctcactgtgtggaattcctgtgtccactggtcaccggggcacagaagtgctgtctcagcctgaatcgggccactgatgggacttgcagcctgggagctccaccgtgatctctggcccactttgcgggagtctaggctttctggatgctccaggcctcacgtcccagggcagttttcttccctgaagaaagttggatggcatgatctgtcttcccatcttgaaaccgtatggcaaattgtttttcagatgaattccctctgctgacaaccaaacgtgtgttctggaagggtgttttggaggagttgctgtggtttatcaaggtaaagaagtcgctgctattagaagtcagtagtctgttctcaacacagcagccagtgagatcctttcaaaactcaaagcagccaggtgtggtggctcacgcctgtaatcccaccgctttgggaggctgagtcagatcacctgaggttaggaatttgggaccagcctggccaacatggcgacaccccagtctctactaataacacaaaaaattagccaggtgtgctggtgcatgtctgtaatcccagctactcaggaggctgaggcatgagaattgctcacgaggcggaggttgtagtgagctgagatcgtggcactgtactccagcctggcgacagagggagaacccatgtcaaaaacaaaaaaagacaccaccaaaggtcaaagcatatcattcctcaccctcaagcccttagtggctccatttcactcagtaagagccacggtccttatggtgtccgtttttcagctctgaccttagctgctgctctctgcaccaccctgctgttcttgtgagtttttgagcacaccgggacatccccactccctggaaccttcttcccccacacttggcttcttcctttgagtctctactccactcgggcaagccttcctagacctcctgatttaaaactgtgactctcccccaacctccttggtgtttctccgtagacgaacatcaccatctgatgtatgtcagcctttcccttcccctgttagaagggggacagcaggtagtaaaagtgaaatgtgctgtaagctttatgagggcagaggatttgtttctcgtgttcactgttgtatcgccagggcctcaaacacagcctgccacatagtaggagtcaacatatattgatcactaaatgtagataccacctgtgttcccatgttcatataaattctagaagagtctcttcagtaacaaggtgaaccccttccagagggctgagtaggtacctcaggccggggccagagtgctgtgaagacagcagcagcccagaccaagcttctctgtgttccgtgtcctggtctagaaccagcgatgttctttctgaccagtgctttttggaaggtggctgaggtctgggctcaggtctgggccatactagaagctgggatcccttctatagagcacttggtatggcttgtatggtcttggggcaagccagacccaagccctcttatcccattttagaaagggcttcaatttggatccagccccaggtctgccttagctctgtattcttggggtattttgttctgtattggcctatcttgactaacaatgagccttggatttgaaacatatcatcagaaacctcagaagacaacattcttaaactggctagagcctggtctgaatggatgaaaaggagagacttttgaagcaatatgtaaaagattgagaaatgatttgttggaaatttctcaattggagaaatttctttgatttgttggaaatttctttgattctttctcaatcaaagaaaatcgggacaaactcaacaatagaaagggaggaagcaagatactcagaaataaaatgcattcccctgtttcaacttaatgcttcaattcaggattctaaggaatccttgccaggaatgtcagactcaccttgatagttggagttactccattggtgactcgatcaaatacaggagttgaggcacctgcactgtaaaatactgattagtctgatcattaggaatatcctgtatgccaggtagaagatacattgaacagattgcatgtaggcattaaattcattttggggtattacatatagacaacacatttcattaagaaacataaaactgtcagatcggtggaatacttaaaagcacttggaggtgtttagcctaaaaagcttagttgaggggaatggaagaaaagatctgggagggtggttccaaagaagggatcagactatcctaaagccctcaggaatctgggctgggaccacctacttaaagataggatgggcagctgggtgtggtggctcacgcctgtaatcccagcacttcgggaggccgaagcgggcggatcacctgaggtcaggagttcgaggccagcctgaccaacatggagaaacgctgtctctactaaaaatacaaaattagctgggtgtagtggcgcatgcctgtaatcccagctactcgggaggctgaggcaggggaatcgcttgaacctgggaggtggagggtgccgtgagccacgatcgcgccattgcactccagcctgggcaacaagagcgaaactctcaaaaaacaaaaaaaaggatgggttccatatgggtggtgtcaagtgcccacctcctagcaagtcagcaggggccagaggcccttgtaagtggtgtctcggggggatcaactgagatggcttaagatttacctggatgcctgctctgctctccccatctcttccagggatccacaaatgctaaagagctgtcttccaagggagtgaaaatctgggatgccaatggatcccgagactttttggacagcctgggattctccaccagagaagaaggggacttgggcccagtttatggcttccagtggaggcattttggggcagaatacagagatatggaatcaggtgaggagatagaacaatgccttccatttccgggtgcccttcctagcacgtgtttgctccgttgttttagataaggtctgggggatgagtcaatgtcacaggagctgatgtatagctttgaccttgtgaggggtggtgccaggttgaagccacaattaacgcctactgaaggccgtttcacatcttttttttttttttttttttaattattatactttaagttttagggtacatgtgcacaatgtgcaggttagttacatatgtatacatgtgccatgctggtgcgctgcaccactaactcaccatctagcatcaggtatatctcccaatgctatccctcccccctcctcccaccccacaacatccccagagtgtgatgttccccttcctgtgtccatatgttctcgttgttcgattcccactatgagtgagaatatgcggtgtttggttttttgttcttgcgatagtttactgagaatgatgatttccatttcaccacgtccctacagaggacatgaactcatcattttttatggctgcatagtattccatggtgtatatgtgccacattttcttaatccagtctatcatgttggacatttgggttggttccaagtctttgcctattgtgaatagtgccacaataaacatacgtgtgcatgtgtctttatagcagcatgatttaatagtcctttgggtatatacccagtaatgggatggctgggtcaaatggtatttctagttctagatccccgaggaatcgccacactgacttccacaatggttgaactagtttacagtcccaccaacagtgtcaaagtgtcctatttctccacatcctctccagcacctgttgtttcctgactttttaatgattgccattctaactggtgtgagatggtatctcattgtggttttgatttgcgtttctctgatggccagtgatggtgagcattttttcatgtgttttttggctgcataaatgtcttcttttgagaagtgtctgttcatgtccttcgcccactttttgatggggttgtttttttcttataaatttgtttgagttcattgtagattctggatattagccctttgtcagatgagtaggttgcaaaaatgttctcccattttgtgggttgcctgttcactctgatggtagtttcttttgctgtgcagaagctctttagtttaattagatcccatttgtcaattttggcttttgttgccattgcttttggcataggcatgaagtccttgcccatgcctatgtcctgaatggtaatgcctaggttttcttctagggtttttatggttttaggtctaacgtttaagtctttaatccatcttgaattgatttttgtataaggtgtaaggaagggatccagtttcagctttttacatatggctagccagttttcccagcaccatttattacatagggaatcctttccccattgcttgtttttctcaggtttgtcaaagatcagatagttgtagatatgcggcgttatttctgagggctctgttctgttccattgatctatgtgtctgttttggtaccagtaccatactgttttggttactgtagccttgtagtatagtttgaagtcaggtagcgtgatgcctccagctttgttcttttggcttaggattgacttggcgatgcgggctcttttttggttccatatgaactttaaagtagttttttccaattctgtgaagaaagtcattggtagcttgatggggatggcattgaatctataaattaccttgggcagtatggccattttcacgatattgattcttcctacccatgagcatggaatggtcttccatttctttgtatcctcttttatttcattgagcagtggtttgtagttctccttgaagaggtccttcacatcccttttaaggtggattcctaggtattttattctctttgaagcaattgtgagtggaagttcactcatgatttggctctctgtttgtctgttattggtgtataagaatgcttgtgatttttgcagattgattttatatcctgagactttgctgaagctgcttatcagcttaaggagattttgggctgagacaatggggttttctagatatacaatcatgtcgtctgcaaacagggacaatttgacttcctcttttcctaattgaataccctttatttccttctcctgcctaattgccctggccagaacttccaacactatgttgaataggagtggtgagagagggcatccctgtcttgtgccagttttcaaagggaatgcttccagtttttgcccattcactatgatattggctgtggctttgtcatagatagctcttattattttgaaatatgttccatcaatacctaatttattgagagtttttagcatgatgtgttgttgaattttgtcaaaggctttttctgcatctattgagataatcatgtggtttttgtctttggatctgtttatatgctggattacatttattgatttgcgtatattgaaccagccttgcatcctagggatgaagcccacatgatcatggtggataagctttttgatgtgctgctggattcggtttgccagtattttattgaggatttttgcatcaatgttcatcaaggatattggtctaaaattctcttttttggtgtgtctctgcccagctttggtatcaggatgatgttggcttcataaaatgagttagggaggattccctctttttctattgattggaatagtttcagaaggaatggtaccagttcctctttgtacctctggagaattcggctgtgaatccatctggtcctggactctctttggttggtaagctattgattattgccacaatttcagctcctgttattggtctattcagagattcaacttcttcctggtttagtcttgggagagtgtatgtgtcaaggaatttatccatttcttctagattttctagtttatttgcgtagaggtgtttgtagtaatctctgatggtagtttgtatttctgtgggatcggtggtgatatcccctttatcattttttattgcgtctatttgattcttctctttttctttattagtcttgctagcggtctataaattttgttgatcctttcaaaaaaccagctcctggattcattaattttttgaagggttttttgtgtctctatttccttcagttctgctctgattttagttatttcttgccttctgctagcttttgaatatgtttgctcttgcttttctagttcttttaattgtgatgttagggtgtcaattttggatctttcctgctttctcttgtgggcatttagtgctataaatttccctctacacactgctttgaatgtgtcccagaggttctggtatgttgtgtctttgttcttgttggtttcaaagaacatctttatttctgccttcatttcgttatgtacccagtagtcattcaggagcaggttgttcagtttccatgtagttgagcagttttgagtgagattcttaatcctgagttctagtttgattgcactgtggtctgagagatagtttgttataatttctgttcttttacatttgctgaggagagctttacttccaactatgtggtcggttttggaataggtgtggtgtggtgctgaaaaaaatgtatattctgttgatttgggatggagttctgtagatgtctattaggtctgcttggtgcagagctgagttcaattcctgggtatccttgttgactttctgtctcgttgatctgtgtactgttgacagtgggtgttaaagtctcccattattaatgtgtggagtctaagtctctttgtaggtcactcagatgattggcacttactgggcgcttggcactttccatactgtgtcatcggcagatagctgcatggttggtgttcgtgctggggaatgggaagttcatcggtgggacaaggacaaaatgcccccattgctttgttgtggctttaatctccctttcgaggctgagccacagcgtgctgtaggtggcgctgctgtgaagcgcagtaccagggtcacactccactcccagctctgcagaggtggagaaagaatgaaacatctcactcctggacttccactttcctgtcactgttggtgtcacctcttactggatgtcacagagcccagcccctcccacctgtgcctaggaaaagcagatgccaccttggaatgtggggtttgtgtgtgcaatttactagctgggcagagaccagcaacctggagagcaggtgtctcgtctaaggggacagtcacatttcacctccagccacctggaggaatttgggcctggtgatgtcagaattcttcaataaaagcctaaaatctatattttatgtgcggtcatgagatctgttaaatgttagcaacttcaggaagtttaaaaatgctgtgtggacctagaataggcaagttcttaaaggcagaaagtggaatgctagtttccagggactggggaacagggaggaatggggagttcatgtttaatgggcacagaggttttgttagggatgacgaaaaagttcgggagatggtgatggtgatggagatggtgatggtgatggagatggtgatggtgatggtgatggtgatgggtgatggtgatggtgatggtgatggtgatggagatggtgatggtgatggtgatggagatggtgatggtgatggtgatggtgatggagatggtgatggtgatggagatggtgatggtgatggtgatggagatggtgatggtgatggtgatggtgatggtgatggtgatggtgatggagatggagatggtgatggtgatggttgcctaacatcaggaacgtgcttaatgcttctgaattgcacacaaaaatggcaagtttaatattatgtgtactttatcacaatgaaaaaagctgctgcgtgggccaagttacttgtgcaggtaatgttctgcaggtggttgcctgcacctcagttgtagggtgtccgtaggatgtgaggccagtccccgggcttaatgatgctttaaatcctgcctagtattcaattatttcttgtcgcttaaaaggcctaataaaattatggtcttagtttacagtggtatgaatgcttagctgttggattttagtaggaaagttcgtccctttttgtttttaattttgttttacagattcacaggaattttttttttttttttttttttttttttttaatgcacagaaagtttccctggactctctacccagtttccccagtgataatatcttgggtaacatcctgtatacattcacattggtgcattcctcagagttgtcagattttgctagttttacgtgcacttgtgtatgtgtgtatttgcaattttagcacgtgtagactcttgtaaccactacaatcaagttacagaactacactaccaaggttcatctttttaaaatctttgatgttaccttttttggaacagtgaccatgagaggactttcctcccaaaattttgaaaactactgaaccagaatatagtctgacactaataggtagaaatttaaccaaaggagattatgaagctctgcacttgagttaacaaaatcacttctcagcttccagttccatctcagaaggaaggaaaagggattaaaaatccagagaccagaaaatgggagcaaagtacaaggtggtgtaatcattacagaggtttcctgatgtttccaagtcagtcgtgtgttgagctgctaaactctaaagtaattttaggtggaatgttggaaacatgctgctgaggtgatagaaaggaatccatggtcctctgttagttggaaagtatatggaatactatattctacataagatacaatactctctgtgagacaaggataaagtagattttgtcagtgaaattgtgacaagaatcgctgatgggtttagagcctaagtttgcgaggagcactggaagaaattaagattgttgagattggaaagggttagctatgggggaacaggaggaggtgactccatgacagaccaaatattcaaaggactgtgtagaagaggaaaaagactttgttagggctccagaggacagagccaggagtcagacagggccttgaactcaacccaccgagatctgcaaactttgcaggatgcaccagatgtcttgtagccatgggtcaaggggggaccctgggtaagagactgtaatagatgacctctaaggccatctcatgacatgtgtgattaatgtatgtacctgtcctctctttttgacaattctacagattattcaggacagggagttgaccaactgcaaagagtgattgacaccatcaaaaccaaccctgacgacagaagaatcatcatgtgcgcttggaatccaagaggttgaaagaaccccgtcgtcttcatttatactaaccatactcttagagggaagcaatctggttttgtgcagaggcactgagggaggcaggaccctgggcaacttcccccagccacatggttgtgtgacgttgggcaagtcacattttgctgcactttcaccttcagatcatgaggttgggcccagaggatttttttttttttttttttttttgagacagagttttgctctgttgcccaggctggaatgcaacggcgtgatcttggctcactgtaacctctgcctcctgggttcgagtgattctcctgcctcagcctccaagtagctgggattacagcatgtgccaccatgcctggctaattttgtatttttagtagagacgggttcacatgttggtcaggctggtcttgactcctgaccctcagatgatctgccttgcctcagcctcccaaccgagtgatcttaagttgtgtattatactcattcttacacaaaaagggctttaaatgcctagaaactacatgaagatgttaacattttaaatggaagcagatgaagttccagctcgctgccacctcactaacatttttaacaattatattgtaaaattcaactctaccagggtgtagagccaggtgtggtggctcacacctgtaattccaacaactccagaggccaaggcgagaggatcatttgaacccacggaatttgaggctgtagtgagtcatgatcacgccattgcactccatcctgggcaacagagtgagaccctgaatatttaaaaacaacaacaacaacaaaactctatcaggatatcataagtacttagagtgaaatacttgcatctgtaatagagacttattttttttttttttgagacacagtctcaccctgttgcccaggctggagtgcagtggtttgatctccgctcacggcaacctccatctcccaggttcaagtgagttcccattcctcagccccagagctgggaccacaggcgcgcgaatttttgtatttttagcagagacggggtttcactatgttggccaggctagtctcaaactcaagttggcctcaagtgatctgcccaccctggcgtcccagtgttgggatttcaggcatgagccactgtgcctggccatgtaatagagacttttaatataggagggtgtaccagaagcaccagtttcctgtggcaaacagaattattcctgctgtatttgtaatttggtgccacgaggtagcccagatcccttcagctctgatggaagagcattgcttcagccgtaaatggacacctgcagaaaccttgcaccgatggatagtctccctcagctccgtgccatcgctgcaggggctgttatggacatcactgcagcccagtggctctctctcctggtctccaccatatgagttggcttctgtttctctcctgttttactttgcctttagctgtggtctttcaaaccaccatccctccttatcttcctctgctggttcctcagatcttcctctgatggcgctgcctccatgccatgccctctgccagttctatgtggtgaacagtgagctgtcctgccagctgtaccagagatcgggagacatgggcctcggtgtgcctttcaacatcgccagctacgccctgctcacgtacatgattgcgcacatcacgggcctgaaggtgggctgtctcgggaagggtgacttgccagcctaccacatgagctcttcagttctttaatatgggaaaacaaattgcagagtttagtctctgattagcttttaaatttgatatgtgtaagtaagacatgaaccagcttttactttgaaaccttccttttctggaaggttttctggccctgtggtatatgcactaacagatctatacaggttgtttgtgatacagcttctatggatcttctcaaaagctatgctgaggttgggtatggtggctcatgcctgtaatcccagcactttggaagactgagacaggagcaattgcttgaggtctggagttcaataccagcctgggcaacataacaagatgctgttgctacaaaaaaatggaaaagctacactaaattatttttttaaaaaaagccttgcggtgtctgcatattctaatgtttttaaatgatgttttaaagaattgaaactaacatactgttctgctttctcccggtttatagccaggtgactttatacacactttgggagatgcacatatttacctgaatcacatcgagccactgaaaattcaggtaagaattagatgttatacttttgggtttggtaccttctcttgataaaaggttgactgtggaacaggtatctgctcaatgctgtgtccaagataaagatgactgctccaaatgtggggcttcagtttagggagaagtggtgggcaggtgggcaggacaaggcaggcatctgcctcagcaaccatggcacttaacttgtcaggtgctgtgaggtactaagcaccagtaccagagagggaagagccacattcaagccaggggattgtccaaaaggaggcattttaactcattttaacttgaaggagaattgaagtgcaaatgtttttccttttctttttttttgagatggagtctttctctgtcggccaggctggagtgtgccgtggtgcgatctcagctcactgcaacctccacctcccgggttcaagcaattcttctgcctcagcctcccaggtagctgggattacaggcacatgccaccacacccagctaattttttgtattattagtagagatggggtttcgtcatgttggccaggctgatctcaaactcctgacttcaagtgtaccacctgcctcagcctccgaaagttctggaattacaggcataagccaccaccctggccataaatattttttgttaattttacattaagtacaatatttaggtccaaacttcaaaagtctgttgaaatccctgaagttatagcagccaacaattgatatgaaatggcaataaaaatgtaagttcatctgcttcatgagccttaaggaaaaaaactcagaaccagacactttttagccccttccaggttagatccaggttttaaaagttattcctttgagggagtttggctgcttttgagtggaggtgacttcaggcttattctctctggctctctgctctggtcatttttagacatagtaataggttgtgacctgtcttcacatcctaattgccactgtctgttcatcccaggaatcctggctttcatccctttctgttcactgtccatgcatgtcatctttccttctttctgccagggaccagatgggttagggattgtgaattcaagtaaacgtagagctactatgagttacagattgactgtgttcctgtctttaataaatttgccaagagtggttataagaacttacacctgatgaggcaccaggctcctgatgctgtgtaatgtcacaaaatacccctcactctcgatctgtgcaagagaacagctggttgcgctccaatcatgttacataacctacgcgaaggtatcgacaggatcatactcctgtaaaatagaactttgttgatcacatcctgtgtacttgtttcacggacatgaggagcaattacaacaggtcgtacaattatggcaaaataatggccttattttgtttttagcttcagcgagaacccagacctttcccaaagctcaggattcttcgaaaagttgagaaaattgatgacttcaaagctgaagactttcagattgaagggtacaatccgcatccaactattaaaatggaaatggctgtttagggtgctttcaaaggagctcgaaggatattgtcagtctttaggggttgggctggatgccgaggtaaaagttctttttgctctaaaagaaaaaggaactaggtcaaaaatctgtccgtgacctatcagttattaatttttaaggatgttgccactggcaaatgtaactgtgccagttctttccataataaaaggctttgagttaactcactgagggtatctgacaatgctgaggttatgaacaaagtgaggagaatgaaatgtatgtgctcttagcaaaaacatgtatgtgcatttcaatcccacgtacttataaagaaggttggtgaatttcacaagctatttttggaatatttttagaatattttaagaatttcacaagctattccctcaaatctgagggagctgagtaacaccatcgatcatgatgtagagtgtggttatgaactttaaagttatagttgttttatatgttgctataataaagaagtgttctgcattcgtccacgctttgttcattctgtactgccacttatctgctcagttccttcctaaaatagattaaagaactctccttaagtaaacatgtgctgtattctggtttggatgctacttaaaagagtatattttagaaataatagtgaatatattttgccctatttttctcattttaactgcatcttatcctcaaaatataatgaccatttaggatagagttttttttttttttttttaaacttttataaccttaaagggttattttaaaataatctatggactaccattttgccctcattagcttcagcatggtgtgacttctctaataatatgcttagattaagcaaggaaaagatgcaaaaccacttcggggttaatcagtgaaatatttttcccttcgttgcataccagatacccccggtgttgcacgactatttttattctgctaatttatgacaagtgttaaacagaacaaggaattattccaacaagttatgcaacatgttgcttattttcaaattacagtttaatgtctaggtgccagcccttgatatagctatttttgtaagaacatcctcctggactttgggttagttaaatctaaacttatttaaggattaagtaggataacgtgcattgatttgctaaaagaatcaagtaataattacttagctgattcctgagggtggtatgacttctagctgaactcatcttgatcggtaggattttttaaatccatttttgtaaaactatttccaagaaattttaagccctttcacttcagaaagaaaaaagttgttggggctgagcacttaattttcttgagcaggaaggagtttcttccaaacttcaccatctggagactggtgtttctttacagattcctccttcatttctgttgagtagccgggatcctatcaaagaccaaaaaaatgagtcctgttaacaaccacctggaacaaaaacagattttatgcatttatgctgctccaagaaatgcttttacgtctaagccagaggcaattaattaatttttttttttttgacatggagtcactgtccgttgcccaggctgcagtgcagtggcgcaatcttggctcactgcaacctccacctcccaggttcaagtgattctcctgcctcagcctcccatgtagctgggatcacaggcacctgccaccatgcccggctaattttttgtattttttgtagagacagggtttcaccatgttggccaggctggtctcaaacacctgacctcaaatgatccacctgcctcagcctcccaaagtgttgggattacaggcgtaagccaccatgcccagccctgaattaatatttttaaaataagtttggagactgttggaaataatagggcagaggaacatattttactggctacttgccagagttagttaactcatcaaactctttgataatagtttgacctctgttggtgaaaatgagccatgatctcttgaacatgatcagaataaatgccccagccacacaattgtagtccaaactttttaggtcactaacttgctagatggtgccaggtttttttgcacaaggagtgcaaatgttaagatctccactagtgaggaaaggctagtattacagaagccttgtcagaggcaattgaacctccaagccctggccctcaggcctgaggattttgatacagacaaactgaagaaccgtttgttagtggatattgcaaacaaacaggagtcaaagcttggtgctccacagtctagttcacgagacaggcgtggcagtggctggcagcatctcttctcacaggggccctcaggcacagcttaccttgggaggcatgtaggaagcccgctggatcatcacgggatacttgaaatgctcatgcaggtggtcaacatactcacacaccctaggaggagggaatcagatcggggcaatgatgcctgaagtcagattattcacgtggtgctaacttaaagcagaaggagcgagtaccactcaattgacagtgttggccaaggcttagctgtgttaccatgcgtttctaggcaagtccctaaacctctgtgcctcaggtccttttcttctaaaatatagcaatgtgaggtggggactttgatgacatgaacacacgaagtccctctgagaggttttgtggtgccctttaaaagggatcaattcagactctgtaaatatccagaattatttgggttcctctggtcaaaagtcagatgaatagattaaaatcaccacattttgtgatctatttttcaagaagcgtttgtattttttcatatggctgcagcagctgccaggggcttggggtttttttggcaggtagggttgggagg

SEQ ID NO: 125 - DNA, 3493 bp, Homo sapiens
agcggccggggccacgatggagcgcgacggctgcgcggggggcgggagccgcggcggcgagggcgggcgcgctccccgggagggcccggcggggaacggccgcgatcggggccgcagccacgctgccgaggcgcccggggacccgcaggcggccgcgtccttgctggcccctatggacgtgggggaggagccgctggagaaggcggcgcgcgcccgcactgccaaggaccccaacacctataaagtactctcgctggtattgtcagtatgtgtgttaacaacaatacttggttgtatatttgggttgaaaccaagctgtgccaaagaagttaaaagttgcaaaggtcgctgtttcgagagaacatttgggaactgtcgctgtgatgctgcctgtgttgagcttggaaactgctgtttagattaccaggagacgtgcatagaaccagaacatatatggacttgcaacaaattcaggtgtggtgagaaaaggttgaccagaagcctctgtgcctgttcagatgactgcaaggacaagggcgactgctgcatcaactacagttctgtgtgtcaaggtgagaaaagttgggtagaagaaccatgtgagagcattaatgagccacagtgcccagcagggtttgaaacgcctcctaccctcttattttctttggatggattcagggcagaatatttacacacttggggtggacttcttcctgttattagcaaactaaaaaaatgtggaacatatactaaaaacatgagaccggtatatccaacaaaaactttccccaatcactacagcattgtcaccggattgtatccagaatctcatggcataatcgacaataaaatgtatgatcccaaaatgaatgcttccttttcacttaaaagtaaagagaaatttaatcctgagtggtacaaaggagaaccaatttgggtcacagctaagtatcaaggcctcaagtctggcacatttttctggccaggatcagatgtggaaattaacggaattttcccagacatctataaaatgtataatggttcagtaccatttgaagaaaggattttagctgttcttcagtggctacagcttcctaaagatgaaagaccacacttttacactctgtatttagaagaaccagattcttcaggtcattcatatggaccagtcagcagtgaagtcatcaaagccttgcagagggttgatggtatggttggtatgctgatggatggtctgaaagagctgaacttgcacagatgcctgaacctcatccttatttcagatcatggcatggaacaaggcagttgtaagaaatacatatatctgaataaatatttgggggatgttaaaaatattaaagttatctatggacctgcagctcgattgagaccctctgatgtcccagataaatactattcatttaactatgaaggcattgcccgaaatctttcttgccgggaaccaaaccagcacttcaaaccttacctgaaacatttcttacctaagcgtttgcactttgctaagagtgatagaattgagcccttgacattctatttggaccctcagtggcaacttgcattgaatccctcagaaaggaaatattgtggaagtggatttcatggctctgacaatgtattttcaaatatgcaagccctctttgttggctatggacctggattcaagcatggcattgaggctgacacctttgaaaacattgaagtctataacttaatgtgtgatttactgaatttgacaccggctcctaataacggaactcatggaagtcttaaccaccttctaaagaatcctgtttatacgccaaagcatcccaaagaagtgcaccccctggtacagtgccccttcacaagaaaccccagagataaccttggctgctcatgtaacccttcgattttgccgattgaggattttcaaacacagttcaatctgactgtggcagaagagaagattattaagcatgaaactttaccctatggaagacctagagttctccagaaggaaaacaccatctgtcttctttcccagcaccagtttatgagtggatacagccaagacatcttaatgcccctttggacatcctataccgtggacagaaatgacagtttctctacggaagacttctccaactgtctgtaccaggactttagaattcctcttagtcctgtccataaatgttcattttataaaaataacaccaaagtgagttacgggttcctctccccaccacaactaaataaaaattcaagtggaatatattctgaagctttgcttactacaaatatagtgccaatgtaccagagttttcaagttatatggcgctactttcatgacaccctactgcgaaagtatgctgaagaaagaaatggtgtcaatgtcgtcagtggtcctgtgtttgactttgattatgatggacgttgtgattccttagagaatctgaggcaaaaaagaagagtcatccgtaaccaagaaattttgattccaactcacttctttattgtgctaacaagctgtaaagatacatctcagacgcctttgcactgtgaaaacctagacaccttagctttcattttgcctcacaggactgataacagcgagagctgtgtgcatgggaagcatgactcctcatgggttgaagaattgttaatgttacacagagcacggatcacagatgttgagcacatcactggactcagcttctatcaacaaagaaaagagccagtttcagacattttaaagttgaaaacacatttgccaacctttagccaagaagactgatatgttttttatccccaaacaccatgaatctttttgagagaaccttatattttatatagtcctctagctacactattgcattgttcagaaactgtcgaccagagttagaacggagccctcggtgatgcggacatctcagggaaacttgcgtactcagcacagcagtggagagtgttcctgttgaatcttgcacatatttgaatgtgtaagcattgtatacattgatcaagttcgggggaataaagacagaccacacctaaaactgcctttctgcttctcttaaaggagaagtagctgtgaacattgtctggataccagatatttgaatctttcttactattggtaataaaccttgatggcattgggcaaacagtagacttatagtagggttggggtagcccatgttatgtgactatctttatgagaattttaaagtggttctggatatcttttaacttggagtttcatttcttttcattgtaatcaaaaaaaaaattaacagaagccaaaatacttctgagaccttgtttcaatctttgctgtatatcccctcaaaatccaagttattaatcttatgtgttttctttttaattttttgattggatttctttagatttaatggttcaaatgagttcaactttgagggacgatctttgaatatacttacctattataaaatcttactttgtatttgtattt

SEQ ID NO: 126 - DNA, 836 bp, Homo sapiens
gtgaaacaccctcggctgggaagtcagttcgttctctcctctcctctcttcttgtttgaacatggtgcggactaaagcagacagtgttccaggcacttacagaaaagtggtggctgctcgagcccccagaaaggtgcttggttcttccacctctgccactaattcgacatcagtttcatcgaggaaagctgaaaataaatatgcaggagggaaccccgtttgcgtgcgcccaactcccaagtggcaaaaaggaattggagaattctttaggttgtcccctaaagattctgaaaaagagaatcagattcctgaagaggcaggaagcagtggcttaggaaaagcaaagagaaaagcatgtcctttgcaacctgatcacacaaatgatgaaaaagaatagaactttctcattcatctttgaataacgtctccttgtttaccctggtattctagaatgtaaatttacataaatgtgtttgttccaattagctttgttgaacaggcatttaattaaaaaatttaggtttaaatttagatgttcaaaagtagttgtgaaatttgagaatttgtaagactaattatggtaacttagcttagtattcaatataatgcattgtttggtttcttttaccaaattaagtgtctagttcttgctaaaatcaagtcattgcattgtgttctaattacaagtatgttgtatttgagatttgcttagattgttgtactgctgccatttttattggtgtttgattattggaatggtgccatattgtcactccttctacttgctttaaaaagcagagttagatttttgcacattaaaaaattcagtattaatt

SEQ ID NO: 127 - DNA, 4203 bp, Homo sapiens
tgacaacatggcggcgcccatggtccgtggcccggcagtgctcgcctaaaggtggagaacgaggagtagaggaggccgcagccagagcctgtgagcagatccagacctacagataaaaaacattatttaatctatctgggatttactccggcttatgatttgagggccttctcaccttctgaagaatggcttctgtttggcagagattgggtttttatgcctctcttctgaaaagacagctaaatggtgggccagatgtcatcaagtgggaaaggagagtaattcccggatgtaccagaagcatctacagtgccacgggaaagtggacaaaagagtatacattgcagacaagaaaggatgttgagaaatggtggcatcaacgaataaaagaacaggcctccaaaatttcagaagctgataaatcgaagccaaaattttacgtgctttccatgttcccttatccttctggtaagctgcacatgggccatgtgcgtgtctacaccatcagcgacaccatagcacggttccagaagatgagagggatgcaggtcatcaaccccatgggatgggatgcttttggattgcctgctgaaaatgccgcagtcgagaggaatctacatccacaaagttggacacaaagtaatattaaacacatgaggaaacagcttgatcgtctgggcctgtgtttcagctgggatagggaaataactacgtgtttgccagattactacaagtggactcagtatctctttattaaactgtatgaggctgggctggcctatcaaaaggaggccctggttaactgggacccagtggatcaaacagtgcttgccaatgagcaggtggatgaacatggctgttcatggcgttctggagcaaaggtggaacagaagtacctcagacaatggtttattaagacaaccgcttatgcaaaggccatgcaggacgcgttggcagaccttccagaatggtatggaataaaaggcatgcaagcccactggattggggactgtgtgggctgccacctggacttcacattaaaggttcatgggcaagccacgggcgaaaagctgactgcctatacggccacccctgaagccatttatggcacctcccacgtggccatctcgcccagccacagactcctacatgggcacagctctctgaaggaagccttgaggatggcccttgtccctggcaaagattgcctcacgcctgtaatggctgtgaacatgcttacccagcaggaggtccctgtcgttattttggccaaagctgacttggaaggctctctggattcaaaaataggaattcccagtactagctcagaggacaccatcttagcccaaaccctgggcctggcctactctgaagtcattgaaactttgccagatggcacagagagactgagcagctctgctgagttcacaggtatgacccggcaggatgcttttctagccctgactcagaaagcccgggggaagagagtgggtggagacgtgacaagtgataaactgaaagactggctgatttcacggcagcggtactggggcacaccaatccccattgtccactgcccagtctgtggccccacacctgtgcccctggaggacttgcctgtgaccctgcccaacatcgcgtctttcactggcaagggaggccccccactggccatggcttcagagtgggtgaactgctcctgcccaaggtgcaagggagcagccaagagagagacagacacgatggatacctttgttgattctgcttggtactacttcagatacactgaccctcataatccacacagcccttttaacacagcagtggccgattactggatgcctgtggatttgtacattggagggaaagaacatgccgtcatgcacttgttctatgcaagattctttagtcatttttgccatgatcaaaaaatggttaaacatagggagccttttcataagctgctggcccaaggccttatcaaggggcagacattccgcctaccatctggacagtatctacagagagaggaagtggatctcacaggttccgttcctgttcatgcaaaaacgaaagagaagttagaggtgacgtgggagaagatgagtaagtccaaacacaacggggtggacccagaggaagttgtggagcagtatgggatcgacacgattcggctctacatcctttttgctgcccctcctgagaaggatatcttgtgggatgtgaaaactgatgctctccctggggtgctgagatggcaacaacgactgtggaccttgacaactcggtttattgaggccagggcttctgggaagtctccccagcctcagctgctgagtaacaaggagaaagctgaggccaggaagctctgggagtacaagaactccgtcatctctcaggtgaccacccatttcacagaggacttctcactgaattctgcaatttctcagctgatgggactcagcaatgccctctcgcaagcctctcagagcgtcattctccacagccccgagtttgaggatgctttgtgtgccctgatggtaatggctgctccactggcccctcatgtaacctcagagatctgggcaggcctggcgctggtgccgaggaagctctgtgcccactacacttgggatgccagtgtgctgctccaggcatggcctgctgtggacccggagttcctgcagcagcctgaggttgtccagatggcagttctgatcaacaataaagcttgtggcaaaattcctgtgccccaacaagttgcccgggaccaggacaaagtccacgaatttgttcttcaaagcgagctgggtgtcaggcttttgcaaggacgaagcatcaagaagtccttcctttccccgagaactgccctcatcaacttcctggtgcaagattgacagccaggaggctgcagctaccacgagggcctctgaggaacctccttccaggcctgggatgagggggcgatgtctgctggcccaggggaagggaaaagacaaatgtcttgactgttgacctcggtcctgtggcagactgcagtcaacagtgtgcctctgtagtgtggcctggtgctggggtgaaggtgagctgggcaaaggagaaatatgagctactgaggagggggttggacatcctgcccctcaccccccacccacactgcaggtagaggaggccatctgatcccatgggaagccatcagagacactgctggtgggagcaggaaggagcagtgcccctcgagcagccaggaagcctgcggatctgggaaatggctctgccttaggcacttctcgggaatttgaggccagcctgaggaactgcaggactcaggtgcaatgtgccagccacttggaactgctaactgagcctccagatggtagtgaatggtctctttgccttcaggctggatgaggaagtcatttaggaaatgttcaaataaccaatatgtggaaatggacacagggatcttctgaagttgctttgaatcaaaaggcaggcagtgctggttcctctgcctgtgtccccaccactccccagctctgtcatgcaggcctgtcctccccaaccccagctggatgtgcctcccaggcctgctgtggttctgacacacaggatcccaggcaaggcaccacttcctcacatgaatgaggagcagcaagtcataaccactcccttgggtatacaatttgctgtgtagtgaagtggaaccaggctcaggctgctggtcccaacctcagagccccaccgcagcccagtagggatgcagcacgccccagagggctcatgtgggccccagatggcaatgccaccattgttgatgtgactccagagccagttattaggaagagcaagctcaccacagaggagtggaactgaggccccccagatgttgcctccggtgtccaagccacagcggtctggctgttgggaagatggccaggaatggactcataccattggcacattaggctaatcctggttttatgtgaagtcagcaattaagtgttcccactagaactgacctaagccactgattaatatttaatgagggaaggtaggggagaatctagccattttataatgccagaaatctatatatgttatctgatgccatttttctgaagtagcctcacatgtggtccccctgcagttcagcagttaacagatgacttttttagtgtaataaaatgtttatcatctatg

SEQ ID NO: 128 - DNA, 906 bp, Homo sapiens
actcttgggaaaactgctgggcaccgtcgtcgcgctgaaggtggttctgtacctgctccgagtgtgcttagcgatggcctggaaatccggcggcgccagccactcggagctaatccacaatctccgcaaaaatggaatcatcaagacagataaagtatttgaagtgatgctggctacagaccgctcccactatgcaaaatgtaacccatacatggattctccacaatcaataggtttccaagcaacaatcagtgctccacacatgcatgcatatgcgctagaacttctatttgatcagttgcatgaaggagctaaagctcttgatgtaggatctggaagtggaatccttactgcatgttttgcacgtatggttggatgtactggaaaagtcataggaattgatcacattaaagagctagtagatgactcagtaaataatgtcaggaaggacgatccaacacttctgtcttcagggagagtacagcttgttgtgggggatggaagaatgggatatgctgaagaagccccttatgatgccattcatgtgggagctgcagcccctgttgtaccccaggcgctaatagatcagttaaagcccggaggaagattgatattgcctgttggtcctgcaggcggaaaccaaatgttggagcagtatgacaagctacaagatggcagcatcaaaatgaagcctctgatgggggtgatatacgtgcctttaacagataaagaaaagcagtggtccaggtggaagtgattttatcttctgctctttcttcttccacacatgcaagtgaaagggtgtgattttaagacattagactacaagagctgtttttggttgtcacctttatgctcctccattataacgtcagaaattcattacattaaaaatgtgaaaaatgt

SEQ ID NO: 129 - DNA, 852 bp, Homo sapiens
ggacggtcctttgttgccgcgaggggtaggagtgggcgtggcggagccagctccgttcggaacactcccgggccgacccgactcgctcatcctgcaggagctgcggcgccaagatgagtggagaggagaacccagccagcaagcccacgccggtgcaggacgtacagggcgacgggcgctggatgtccctgcaccatcggttcgtggctgacagcaaagataaggaacccgaagtcgtcttcatcggggactccttggtccagctcatgcaccagtgcgagatctggcgcgagctcttctctcctctgcatgcacttaactttggcattggtggtgacggcacacagcatgtactgtggcggctggagaatggggagctggaacacatccggcccaagattgtggtggtctgggtgggcaccaacaaccacggacacacagcagagcaggtgactggtggcatcaaggccattgtgcaactggtgaatgagcgacagccccaggcccgggttgtggtgctgggcctgcttccgcgaggccaacatcccaacccacttcgggagaagaaccgacaggtgaacgagctggtacgggcggcactggctggccaccctcgggcccacttcctagatgccgaccctggctttgtgcactcagatggcaccatcagccatcatgacatgtatgattacctgcatctgagccgcctgggctacacacctgtttgccgggctctgcactccctgcttctgcgtctgctggcccaagaccagggccaaggtgctcccctgctggagcccgcaccctaagcatcctgctgccttcccacaacattaaactctccttcctcag

SEQ ID NO: 130 - DNA, 5404 bp, Homo sapiens
cctgtgttacatctggaagcaagcagtgctgctgacggtgtgagtgctgcatgggaggaggtggctggccaccacgcagaccgtggcccgcagggatcggatgccaatggtgatggtgaccagggccatgagaatgccgcattgccagacccgcaggagtcggacccagcagacatgaacgctctcgctctgggtccctcagaatatgactctctgcctgaaaatagcgagacaggaggaaatgagtctcaaccagacagccaggaagacccccgagaagtacttaaaaaaacattggaattctgcttatctagggagaaccttgctagtgacatgtatcttatatcacagatggatagtgaccagtatgtgccaatcacaacggtggctaacctcgaccacatcaagaagctcagcactgatgtggacttgattgtggaagtgctaagatctttacctttagtccaagtggatgaaaagggagaaaaagtaaggccaaatcaaaatcgctgcatagtaatattgcgtgaaatatctgaatctacccccgtggaagaagtagaagcactatttaaaggagataatttaccaaaatttataaactgtgaatttgcatataatgataattggtttattacatttgaaacagaagctgatgcacaacaggcttacaaataccttcgagaagaagtcaaaacttttcaaggaaaaccaattaaggcacggataaaagcaaaggcaatagctataaacacatttttgccaaagaatggatttagacccctggacgtgagcctgtatgcccagcagcgctacgcgacgtcgttctacttccctcccatgtacagcccccagcagcagttccccctgtacagcctgatcactccccagacgtggtcagcaacgcacagctatcttgacccacccttggtaactccatttccaaatactggatttataaatgggtttacgtctccagcgttcaagcctgcggcgtctcctctgacttctctcagacagtatcctcctcgaagcaggaatcctagtaaatctcatctgcggcatgcgattcctagtgcagagaggggacctgggttattagaaagtccttcaatatttaacttcactgcagatcgattaattaatggtgtccggagtccacaaacaaggcaagcaggtcaaactagaacacggattcaaaacccttcagcatatgccaagagagaggctgggcctgggcgtgtggagccaggcagtctcgaatcctctcctggtttagggaggggaaggaagaattcctttggctaccggaagaaaagggaggagaagtttacaagcagccagacacagtctccaacgccaccaaagcctccgtcgccaagcttcgagctggggctgtccagcttccctccattacctggagctgccggcaatttgaagacagaggacttgtttgaaaacaggctatctagcttgataataggaccatccaaagaaaggaccctcagtgcagacgcaagcgtgaacacccttcctgtagtggtctccagagagccctcggtgccggcttcttgtgctgtatcagcaacgtacgagcgatccccctccccagctcatttacccgatgatcccaaggtggcggagaaacagagggaaacccacagtgtggacagacttccttccgccctcactgcgaccgcgtgtaaatcggtgcaggtgaacggagccgccacggaattgcgaaagcccagctacgcagagatttgtcagagaacgagtaaagagcctccttcttccccattgcaaccccaaaaagaacaaaagccaaacactgttggttgtgggaaggaggaaaagaagctggcagagcccgcagagagataccgggagcccccagccctcaagtccacacctggagcccccagagaccagaggcggccggcggggggccggccctcgccctcggccatggggaagcgtctcagccgagagcagagcactccccccaagtctcctcagtgaaaaccgtacgtctgggaggggtcgcagagcgctgtgttaaccacaaacgagacactctcccactcagtgcgagggcgagccgctggttaggagcttgcagtgtctgaggcctgtgggatcctcaagttggttttcttctgtgagttggattctccccctcttgaaaaaaaatcgatttttcaggatttaattaatacaaaccttattttaggttggtgcttaactggaggtgatgcataagtctgatttttttttccaagatagaaaaagcatttatcctaacaaattggtattttttattaagcctccatgtggctctgaatgcaagctatatatagtgagtttttctaaattaagggaactctgctttttttttttttttttaagtaactggtctgtaagtgcatatctctagaacgtccccgcagatgaatgagggccagtggccttggcagaggcaggtgtggcctcgtagaggcagtgctggccgcgccagggcatcagtgctgatgtgggagctgtgcttccacctaagccgttggtaggggactgtggcatttaagaatgtagagagcgcatcctttttgatctcctgggcggagtgaacctgcaggggccaccccagaaaccttggttctgatgcactgcaagcaagtaaccagcttctcactccagtttcaagtggctattatgtaatataaattcaaagcacattgtgaatagaacctacatgaaaacatacactttgttgcccactgacatgttaccagaagttgtaccatgatgttgttttgacccctgtgagctgatggccccggccctgctctgtgcacatttctgtccgtgttccccagcactctggttggagagagtccacatcttcagctccgtgtggacatctccctgtacctctgcatcagcacatggatttaagagttatgtaatcgtgagagaatggtgtttgtggtttttccccctctttggctggtggaggataaagttcctgctcttttacctccaagacgagggcctcattgattcacttccagaagtgctgcacttctgaagaacaaggatgcactaaagttagcaagtttataataaagttaaatataaattattttgttttaaaatgcctcaaatttttctttattctaagcagcaaacattaaaataagaatatttcctgctaaatgtaaccatacactttattccacaaaatgttatttaacaagactgagggttttttttaagaaaaaattatttccatccaatatttaaagacttgaattttatttaaacttgaaaatgactttgccttaacttttgtataagacagcttagagtccatggagcccggccctgggttggcgtgagtgggtcagagttactcagttactgcgtggatctcctgtcgctagttttactgagtaagcatactgtagtacaagagctagtagtagtttttgtaatataccttaaagatcttcaacagttgatcttttttcagaatgttggaaaatcctgtaaatgcaaatagtcaatactgtattaaatacgtgcacttggagtgtgcttcgcttgtacagttgtaaataatcagaacatatgaaaaaggtaccctacagagaaaattctgatacagattattgatatattataaatgttgctgttgagcgggatgtagataaactaaatgttgtggtttgaatattattttgatttgttgagattttcttttttctcttacatcggtgtgttgaactgattctgcctctttgctgcaaaagggaattggaaagtcttattaaaagcctccagatgttttcatactcttttaaaatgtatgtaaatgcatactaatcatatctaatgtgaaagagttttaaagtatatagagagcaaaaactggcaggatcgtaagtgaaggtgactagtaatctaatttaaatcacctgcagctaagcatgattgaccctgccagaggaaaacatgcctatttgaccatttcctttaaagcagttgccattattcaaatacagagaaatagccacagggctagtgtttttcaaatgcattttaaagaacatggggatttttttttgtagttgtcagttcactgaccaaaaaaaaaaaaaaaatcagaaataattgatctgtgaaacccaaactctcaatactcagaaagctgggaggcaacctcgaggcctgggcctacgagctgcatcttcgctacggaagggccagggcgccatcagccattcccaaaacacaaggcctgcccgtccgccagtgagtccttggtttttaataatgagaagtcctttcccccaaggtgtgagcattgcagcgcagtgtgtgtgtgtggttagagccagcttagtccttcactttgtcgaccgaagtgggagctcaacagctgcatgaggagggcagcgcgtgcattagccagtcgccactggagggctctgctgccctccggtcaatacactgtagttactgcctagccagcagcagtcttctgcatcaagaactgaaaccttgctcggaggtgatttttatagcatcctttttaattaaaggtgaaatacagattgctatataatgtctgaaaaaacctgatactacttcaagagtttctgctcagaagaaaatgagagttatcataataggaagctgtggcggtccatgccaactgtgctgtgtcacatacagcgatgagagtggctttcatactttttttttttttaagttaacaccctcctttacccccagcagtatctcaggttatagaatcagagatgcagcagtgacaaatggcattttaacttgtaaaatcgtgtgatgatgcttatcattttgaaatagaagaataaaaacctggtcccgtttcaccagacatgaatttcaagtggagtcgtcgttctctgagagtgagtgtcttgacattttcacccaggccctcctgtcatcacatcaccggctgtcactggcgggtggccgtaaacgtcctgcgttgctatattaggatctctgcagttcaggcttcaaaaccagttcagtgtatccgggcgacgggtagtggtggtgcatgcctgtctgtgtgccccgctggcgagctgtagttgcggcttgcgtgcctcgcggcccactacagggctgcagacaatcgaggcgagggcgctggccgccagcagctcacagcgcgggggtcatgtggtcgctcctcgagggtttcgtttttgttctgcttcattaagactggaatcaagcttacatgtaaactattggtaatttaagtttccttttgtgtcattcagtgtaaaactgtctaatttgaaaaaaaatgtaggttatgaaaataaagatttaggcactgttc

SEQ ID NO: 131 - DNA, 4121 bp, Homo sapiens
acaatgtggtcccgaagcggccagcgccgggagctgcagcgctgagacccccagcccgccccctcgggctcccggccggggccccatcatgttctccaggaagaaacgagagctcatgaaaaccccttccatctcgaaaaagaaccgcgcgggaagccccagcccgcagccctcgggggagctgcccaggaaggatggggctgacgcggtgttccccggaccaagcctggagccgcccgctgggtcctccggcgtcaaggccacagggaccctcaagcggcccaccagcctgagccgccacgccagcgcggctggcttccccctgtcgggtgctgcctcctggacactgggccggagccaccggagcccactgacagccgccagcccgggcgagctgcccaccgagggtgccggcccggacgtcgtcgaggacatctcccatctgctggcggacgtggcccgcttcgctgagggccttgagaaacttaaggagtgtgtgttgcgtgacgacctccttgaggcccgccgcccgcgggcccacgagtgcctgggtgaggctctgcgtgtcatgcatcagatcatctccaagtacccgctgctgaacaccgtggagacgctcaccgcagccggcaccctcattgccaaggtcaaagccttccattatgagagcaacaatgatctggagaaacaggagttcgagaaggccctggagacgattgctgtggccttcagtagcacagtgtccgagttcctcatgggtgaagtggacagcagcaccctcctagcagtgcctcctggggactcgagccagtccatggaaagcctgtatggaccgggcagtgagggcacgcctcccagcctggaagactgtgacgccggctgcctgcccgccgaggaggtggacgtgctgctacagcgctgtgaggggggcgtggatgccgcactgctgtatgccaagaacatggccaagtacatgaaggacctcatcagctacctggagaagcggacgacgctggagatggagtttgccaagggcctgcagaagatcgctcacaactgcagacagagcgtcatgcaggagccccacatgccgctcctgtccatctactcgctggccctggagcaggacctggagttcggccacagcatggtgcaggcggtgggcaccttgcagacccagaccttcatgcagcccctgaccctgcggcggcttgaacacgagaagcgcaggaaggagatcaaggaggcctggcaccgtgcccagaggaagctgcaagaggcggagtccaacctgcgcaaggccaagcagggttacgtgcagcgctgcgaggaccacgacaaggctcgcttcctcgtggccaaggcggaggaggagcaggctggcagcgcgccgggagcaggcagcacggccaccaagaccctggacaagcggcggcggctggaggaggaggccaagaacaaggcggaggaagctatggccacctaccgcacctgcgtggccgacgcgaagacgcagaagcaggagctggaggataccaaggtgacggcgctgcggcagatccaggaggtcatccggcagagcgaccaaaccatcaagtcggccacgatctcctactaccagatgatgcatatgcagacggcgccgctgcccgtgcacttccagatgctgtgtgagagcagcaagctgtatgacccaggccagcagtacgcctcccacgtgcgccagctgcagcgggaccaggagcccgatgtgcactacgactttgagccccacgtctccgccaacgcctggtcccccgtcatgcgtgcccggaagagcagcttcaacgtgagtgatgtggcgcggccggaggctgccgggagccccccagaagaaggcgggtgcactgagggcacacctgccaaggaccacagggccgggcgaggacaccaggttcacaagtcatggccgctctcgatctcagactcggacagtgggctggaccccggccctggcgcaggggactttaagaagttcgagcggacgtcatccagtggtaccatgtcgtccacggaggagctggtggacccagacggtggagccggggcttcagcctttgagcaggctgacctcaacggcatgacccccgagctgccggtggccgtgcccagtggaccgttccgccacgaggggctgtccaaggcggcccgtactcaccggctccggaagctccgcacgcccgccaagtgccgcgagtgcaacagctacgtctacttccagggtgctgagtgtgaagagtgctgcctggcctgccacaagaaatgtctggagacgctggccatacagtgcgggcacaagaagctgcaaggccgcctgcagctgttcggccaggacttcagccacgcggcccgcagcgcccccgacggcgtgcccttcatcgtcaagaagtgcgtctgcgagatcgagcggcgggcgctgcgcaccaagggcatctaccgggtcaatggggtaaagacacgcgtggagaagctgtgccaggccttcgagaacggcaaggagctggtcgagctgtcgcaggcctcgccccacgacatcagcaacgtcctcaagctctacctgcgtcagcttcccgagccgctcatctccttccgcctctaccacgagctcgtagggctggccaaggacagcctgaaggcagaggccgaggccaaggcggcgtcccggggccggcaggacggctcggagagcgaggcagtggcggtggccctggcaggtcggctgcgggagctcctgcgggacctgccgcctgagaaccgggcctcgctgcagtacctgctgcgtcacctacgcaggatcgtggaggtggagcaggacaacaagatgacccccgggaacctgggcatcgtgttcgggcccacgctgcttcggccacggcccaccgaggccaccgtgtccctctcctccctggtggattatccccatcaggcccgcgtcatcgagactctcatcgtccactacggcctggtcttcgaggaggagccggaggagacccccgggggccaggacgagtcatccaaccagcgagctgaggtagtcgtccaggtgccgtacctggaggcgggcgaggcggtggtctacccgctgcaggaggcggcggcggacgggtgcagagaatcccgagttgtgtccaacgattcggactcggacctagaggaggcctccgagctgctgtcctcatcggaggccagtgccctgggccacctcagcttcctggagcagcagcagagcgaggccagcctagaggtggcttctggcagccacagcggcagtgaggagcagctggaggccacagcccgggaggacggggacggggacgaggacggcccggcccagcagctctcaggattcaacaccaaccagtccaacaacgtgctgcaggccccactgccccccatgaggctccgtggcgggcggatgacactgggctcctgcagggaaaggcagccggaattcgtgtgagctggggtggggctgggaccacaggtggcttctctcttgcctgctcctgtccctccagcacgtcccctgcaccacggcatagcttaggtgcgccgtcctggggtcgctgccgagagcgcctggacttcgacgtcccaccagcgggcgcctcctcccagaggcttccaggagcacgagggccttgcggcacaggactgtgccctgtgctgtcccctgcaccccggctcagctgagctggggaacactgctgtcgtgtgaagtcacagtggccttgttggtgcccacagggctgtgtggatggaggaagctgtccctgcccagtgcatcccccaggtcatcacggggacgcaggaggcaggccctgccctgccctctcctcacaggtctgttgcagggactccagaaaccattctgggagccgtggatgggggcggagctggggtttggtgcagtttccagggtgcagtacagcagggcctgaatactggccctggactcccttttccagaacaccaggtgtggccacctggggctcaggtacacagtggggtctctcggaagccaccgtgtggttctttcacaggcacgtttattttgctgaaataaaaagtttttaatcggg

SEQ ID NO: 132 - DNA, 4792 bp, Homo sapiens
ggaccacccagtaccgatcccttcacgaccgtcaccatggaagtgtcaccattgcagcctgtaaatgaaaatatgcaagtcaacaaaataaagaaaaatgaagatgctaagaaaagactgtctgttgaaagaatctatcaaaagaaaacacaattggaacatattttgctccgcccagacacctacattggttctgtggaattagtgacccagcaaatgtgggtttacgatgaagatgttggcattaactatagggaagtcacttttgttcctggtttgtacaaaatctttgatgagattctagttaatgctgcggacaacaaacaaagggacccaaaaatgtcttgtattagagtcacaattgatccggaaaacaatttaattagtatatggaataatggaaaaggtattcctgttgttgaacacaaagttgaaaagatgtatgtcccagctctcatatttggacagctcctaacttctagtaactatgatgatgatgaaaagaaagtgacaggtggtcgaaatggctatggagccaaattgtgtaacatattcagtaccaaatttactgtggaaacagccagtagagaatacaagaaaatgttcaaacagacatggatggataatatgggaagagctggtgagatggaactcaagcccttcaatggagaagattatacatgtatcacctttcagcctgatttgtctaagtttaaaatgcaaagcctggacaaagatattgttgcactaatggtcagaagagcatatgatattgctggatccaccaaagatgtcaaagtctttcttaatggaaataaactgccagtaaaaggatttcgtagttatgtggacatgtatttgaaggacaagttggatgaaactggtaactccttgaaagtaatacatgaacaagtaaaccacaggtgggaagtgtgtttaactatgagtgaaaaaggctttcagcaaattagctttgtcaacagcattgctacatccaagggtggcagacatgttgattatgtagctgatcagattgtgactaaacttgttgatgttgtgaagaagaagaacaagggtggtgttgcagtaaaagcacatcaggtgaaaaatcacatgtggatttttgtaaatgccttaattgaaaacccaacctttgactctcagacaaaagaaaacatgactttacaacccaagagctttggatcaacatgccaattgagtgaaaaatttatcaaagctgccattggctgtggtattgtagaaagcatactaaactgggtgaagtttaaggcccaagtccagttaaacaagaagtgttcagctgtaaaacataatagaatcaagggaattcccaaactcgatgatgccaatgatgcagggggccgaaactccactgagtgtacgcttatcctgactgagggagattcagccaaaactttggctgtttcaggccttggtgtggttgggagagacaaatatggggttttccctcttagaggaaaaatactcaatgttcgagaagcttctcataagcagatcatggaaaatgctgagattaacaatatcatcaagattgtgggtcttcagtacaagaaaaactatgaagatgaagattcattgaagacgcttcgttatgggaagataatgattatgacagatcaggaccaagatggttcccacatcaaaggcttgctgattaattttatccatcacaactggccctctcttctgcgacatcgttttctggaggaatttatcactcccattgtaaaggtatctaaaaacaagcaagaaatggcattttacagccttcctgaatttgaagagtggaagagttctactccaaatcataaaaaatggaaagtcaaatattacaaaggtttgggcaccagcacatcaaaggaagctaaagaatactttgcagatatgaaaagacatcgtatccagttcaaatattctggtcctgaagatgatgctgctatcagcctggcctttagcaaaaaacagatagatgatcgaaaggaatggttaactaatttcatggaggatagaagacaacgaaagttacttgggcttcctgaggattacttgtatggacaaactaccacatatctgacatataatgacttcatcaacaaggaacttatcttgttctcaaattctgataacgagagatctatcccttctatggtggatggtttgaaaccaggtcagagaaaggttttgtttacttgcttcaaacggaatgacaagcgagaagtaaaggttgcccaattagctggatcagtggctgaaatgtcttcttatcatcatggtgagatgtcactaatgatgaccattatcaatttggctcagaattttgtgggtagcaataatctaaacctcttgcagcccattggtcagtttggtaccaggctacatggtggcaaggattctgctagtccacgatacatctttacaatgctcagctctttggctcgattgttatttccaccaaaagatgatcacacgttgaagtttttatatgatgacaaccagcgtgttgagcctgaatggtacattcctattattcccatggtgctgataaatggtgctgaaggaatcggtactgggtggtcctgcaaaatccccaactttgatgtgcgtgaaattgtaaataacatcaggcgtttgatggatggagaagaacctttgccaatgcttccaagttacaagaacttcaagggtactattgaagaactggctccaaatcaatatgtgattagtggtgaagtagctattcttaattctacaaccattgaaatctcagagcttcccgtcagaacatggacccagacatacaaagaacaagttctagaacccatgttgaatggcaccgagaagacacctcctctcataacagactatagggaataccatacagataccactgtgaaatttgttgtgaagatgactgaagaaaaactggcagaggcagagagagttggactacacaaagtcttcaaactccaaactagtctcacatgcaactctatggtgctttttgaccacgtaggctgtttaaagaaatatgacacggtgttggatattctaagagacttttttgaactcagacttaaatattatggattaagaaaagaatggctcctaggaatgcttggtgctgaatctgctaaactgaataatcaggctcgctttatcttagagaaaatagatggcaaaataatcattgaaaataagcctaagaaagaattaattaaagttctgattcagaggggatatgattcggatcctgtgaaggcctggaaagaagcccagcaaaaggttccagatgaagaagaaaatgaagagagtgacaacgaaaaggaaactgaaaagagtgactccgtaacagattctggaccaaccttcaactatcttcttgatatgcccctttggtatttaaccaaggaaaagaaagatgaactctgcaggctaagaaatgaaaaagaacaagagctggacacattaaaaagaaagagtccatcagatttgtggaaagaagacttggctacatttattgaagaattggaggctgttgaagccaaggaaaaacaagatgaacaagtcggacttcctgggaaaggggggaaggccaaggggaaaaaaacacaaatggctgaagttttgccttctccgcgtggtcaaagagtcattccacgaataaccatagaaatgaaagcagaggcagaaaagaaaaataaaaagaaaattaagaatgaaaatactgaaggaagccctcaagaagatggtgtggaactagaaggcctaaaacaaagattagaaaagaaacagaaaagagaaccaggtacaaagacaaagaaacaaactacattggcatttaagccaatcaaaaaaggaaagaagagaaatccctggcctgattcagaatcagataggagcagtgacgaaagtaattttgatgtccctccacgagaaacagagccacggagagcagcaacaaaaacaaaattcacaatggatttggattcagatgaagatttctcagattttgatgaaaaaactgatgatgaagattttgtcccatcagatgctagtccacctaagaccaaaacttccccaaaacttagtaacaaagaactgaaaccacagaaaagtgtcgtgtcagaccttgaagctgatgatgttaagggcagtgtaccactgtcttcaagccctcctgctacacatttcccagatgaaactgaaattacaaacccagttcctaaaaagaatgtgacagtgaagaagacagcagcaaaaagtcagtcttccacctccactaccggtgccaaaaaaagggctgccccaaaaggaactaaaagggatccagctttgaattctggtgtctctcaaaagcctgatcctgccaaaaccaagaatcgccgcaaaaggaagccatccacttctgatgattctgactctaattttgagaaaattgtttcgaaagcagtcacaagcaagaaatccaagggggagagtgatgacttccatatggactttgactcagctgtggctcctcgggcaaaatctgtacgggcaaagaaacctataaagtacctggaagagtcagatgaagatgatctgttttaaaatgtgaggcgattattttaagtaattatcttaccaagcccaagactggttttaaagttacctgaagctcttaacttcctcccctctgaatttagtttggggaaggtgtttttagtacaagacatcaaagtgaagtaaagcccaagtgttctttagcttt

SEQ ID NO: 133 - DNA, 1685 bp, Homo sapiens
gagtagctgctttcggtccgccggacacaccggacagatagacgtgcggacggcccaccaccccagcccgccaactagtcagcctgcgcctggcgcctcccctctccaggtccatccgccatgtggcccctgtggcgcctcgtgtctctgctggccctgagccaggccctgccctttgagcagagaggcttctgggacttcaccctggacgatgggccattcatgatgaacgatgaggaagcttcgggcgctgacacctcaggcgtcctggacccggactctgtcacacccacctacagcgccatgtgtcctttcggctgccactgccacctgcgggtggttcagtgctccgacctgggtctgaagtctgtgcccaaagagatctcccctgacaccacgctgctggacctgcagaacaacgacatctccgagctccgcaaggatgacttcaagggtctccagcacctctacgccctcgtcctggtgaacaacaagatctccaagatccatgagaaggccttcagcccactgcggaagctgcagaagctctacatctccaagaaccacctggtggagatcccgcccaacctacccagctccctggtggagctccgcatccacgacaaccgcatccgcaaggtgcccaagggagtgttcagcgggctccggaacatgaactgcatcgagatgggcgggaacccactggagaacagtggctttgaacctggagccttcgatggcctgaagctcaactacctgcgcatctcagaggccaagctgactggcatccccaaagacctccctgagaccctgaatgaactccacctagaccacaacaaaatccaggccatcgaactggaggacctgcttcgctactccaagctgtacaggctgggcctaggccacaaccagatcaggatgatcgagaacgggagcctgagcttcctgcccaccctccgggagctccacttggacaacaacaagttggccagggtgccctcagggctcccagacctcaagctcctccaggtggtctatctgcactccaacaacatcaccaaagtgggtgtcaacgacttctgtcccatgggcttcggggtgaagcgggcctactacaacggcatcagcctcttcaacaaccccgtgccctactgggaggtgcagccggccactttccgctgcgtcactgaccgcctggccatccagtttggcaactacaaaaagtagaggcagctgcagccaccgcggggcctcagtgggggtctctggggaacacagccagacatcctgatggggaggcagagccaggaagctaagccagggcccagctgcgtccaacccagccccccacctcaggtccctgaccccagctcgatgccccatcaccgcctctccctggctcccaagggtgcaggtgggcgcaaggcccggcccccatcacatgttcccttggcctcagagctgcccctgctctcccaccacagccacccagaggcaccccatgaagcttttttctcgttcactcccaaacccaagtgtccaaagctccagtcctaggagaacagtccctgggtcagcagccaggaggcggtccataagaatggggacagtgggctctgccagggctgccgcacctgtccagaacaacatgttctgttcctcctcctcatgcatttccagccttg

SEQ ID NO: 134 - DNA, 2334 bp, Homo sapiens
agacacctctgccctcaccatgagcctctggcagcccctggtcctggtgctcctggtgctgggctgctgctttgctgcccccagacagcgccagtccacccttgtgctcttccctggagacctgagaaccaatctcaccgacaggcagctggcagaggaatacctgtaccgctatggttacactcgggtggcagagatgcgtggagagtcgaaatctctggggcctgcgctgctgcttctccagaagcaactgtccctgcccgagaccggtgagctggatagcgccacgctgaaggccatgcgaaccccacggtgcggggtcccagacctgggcagattccaaacctttgagggcgacctcaagtggcaccaccacaacatcacctattggatccaaaactactcggaagacttgccgcgggcggtgattgacgacgcctttgcccgcgccttcgcactgtggagcgcggtgacgccgctcaccttcactcgcgtgtacagccgggacgcagacatcgtcatccagtttggtgtcgcggagcacggagacgggtatcccttcgacgggaaggacgggctcctggcacacgcctttcctcctggccccggcattcagggagacgcccatttcgacgatgacgagttgtggtccctgggcaagggcgtcgtggttccaactcggtttggaaacgcagatggcgcggcctgccacttccccttcatcttcgagggccgctcctactctgcctgcaccaccgacggtcgctccgacggcttgccctggtgcagtaccacggccaactacgacaccgacgaccggtttggcttctgccccagcgagagactctacacccgggacggcaatgctgatgggaaaccctgccagtttccattcatcttccaaggccaatcctactccgcctgcaccacggacggtcgctccgacggctaccgctggtgcgccaccaccgccaactacgaccgggacaagctcttcggcttctgcccgacccgagctgactcgacggtgatggggggcaactcggcgggggagctgtgcgtcttccccttcactttcctgggtaaggagtactcgacctgtaccagcgagggccgcggagatgggcgcctctggtgcgctaccacctcgaactttgacagcgacaagaagtggggcttctgcccggaccaaggatacagtttgttcctcgtggcggcgcatgagttcggccacgcgctgggcttagatcattcctcagtgccggaggcgctcatgtaccctatgtaccgcttcactgaggggccccccttgcataaggacgacgtgaatggcatccggcacctctatggtcctcgccctgaacctgagccacggcctccaaccaccaccacaccgcagcccacggctcccccgacggtctgccccaccggaccccccactgtccacccctcagagcgccccacagctggccccacaggtcccccctcagctggccccacaggtccccccactgctggcccttctacggccactactgtgcctttgagtccggtggacgatgcctgcaacgtgaacatcttcgacgccatcgcggagattgggaaccagctgtatttgttcaaggatgggaagtactggcgattctctgagggcagggggagccggccgcagggccccttccttatcgccgacaagtggcccgcgctgccccgcaagctggactcggtctttgaggagccgctctccaagaagcttttcttcttctctgggcgccaggtgtgggtgtacacaggcgcgtcggtgctgggcccgaggcgtctggacaagctgggcctgggagccgacgtggcccaggtgaccggggccctccggagtggcagggggaagatgctgctgttcagcgggcggcgcctctggaggttcgacgtgaaggcgcagatggtggatccccggagcgccagcgaggtggaccggatgttccccggggtgcctttggacacgcacgacgtcttccagtaccgagagaaagcctatttctgccaggaccgcttctactggcgcgtgagttcccggagtgagttgaaccaggtggaccaagtgggctacgtgacctatgacatcctgcagtgccctgaggactagggctcccgtcctgctttgcagtgccatgtaaatccccactgggaccaaccctggggaaggagccagtttgccggatacaaactggtattctgttctggaggaaagggaggagtggaggtgggctgggccctctcttctcacctttgttttttgttggagtgtttctaataaacttggattctctaaccttt

SEQ ID NO: 135 - DNA, 692 bp, Homo sapiens
ttccccgagccgcagtcttggaccataatcatggtggacatgatggacttgcccaggtcgcgcatcaacgccggcatgctagctcaattcatcgacaagcctgtctgcttcgtagggaggctggaaaagattcatcccaccggaaaaatgtttattctttcagatggagaaggaaaaaatggaaccatcgagttgatggaaccccttgatgaagaaatctctggaattgtggaagtggttggaagagtaaccgccaaggccaccatcttgtgtacatcttatgtccagtttaaagaagatagccatccttttgatcttggactttacaatgaagctgtgaaaattatccatgacttccctcagttttatcctttagggattgtgcaacatgattgatcttgatggattttcatacgattgtaaatgagctatattaaagtctattaaaggaagcccttcttgtttgagggagagatttctgtgctttctcatatttaatttgctgtttttaagatattccaacctagagtttttgatggaactgatatattgacagttctcaccgaagcccttttataaagaattgctactccaatatatggtcagattagatgcaagaataaagcagttgtccgagtctaagtttctattttattaataaaaactaaaatggtacgtacaaaaaaaaaacc

SEQ ID NO: 136 - DNA, 2002 bp, Homo sapiens
ctcttctcacatcagcgggtccaggcccaaccgacagactatgggggctccttcaccaggcgctgcgtggagtggctgctgggcctctacttcctcagccacatccccatcaccctgttcatggacctgcaggcggtcgtgccgcgcgagctctacccagtcgagtttagaaacctgctgaagtggtatgctaaggagttcaaagacccactgctacaggagcccccagcctggtttaagtcctttctgttttgcgagcttgtgtttcagctgcctttctttcccattgcaacgtatgccttcctcaaaggaagctgcaagtggattcgaactcctgcaatcatctactctgttcacaccatgacaaccttaattctgatactctccacatttctgtttgaggatttctccaaagccagtggtttcaagggacaaagacctgagactttgcatgaacggttaacccttgtgtctgtctatgccccctacttactcatcccattcatacttttaattttcatgttgcggagcccctactacaagtatgaagagaaaagaaaaaaaaaatgaaggaaacaaccactggcccagggtagagatgcctacagggtggttgcttgttggatacatacaggaacactgctcagaacccacgtcttcagcagcatttgaaacactggcagcaatgcacaagagcaagatggtgtcaggaaccatgtcaaaccctcaccttcttccattttttttttttttttgagacagtctcactctgttgccaggctggagtaaagggcagtggcatgatctcggctcactgcaacctccgcctcctgggctcaagccatcttccttagcctcccaagtagctagaactacaggtgtgtaccaacacgtatggctaatttgttttgttttttttgtgtgtgtggagacagggttttgccatgttgcccaggttggtctcgaacgcctaggctcaagtgatctgcccacctcagtctccctaagtgctgggattacagacgtgaaccactgggcccagcccaaaccttcaccttctaagggcactgggatgaacagaccgatcggcttgagggtgggcaaaggggtgtgggctaggttataaggaagtggtaccaaataactgtgttgcctgagttccaccgcaagattactaaaagcaggaccagaccagaaactgctaaagaacatggcctgtttgacatgttcatgagtcacctgacccacagcatatatgcttatgactaaaccctccactcctgattctcaagagtgtatcacctgtcagcaaaatgaatagtgggatattttgggccattttaaatgtgaaattttgcctctttaatgttaattcaaaactatatcaatgttttcttgttcccacctctaacccaaggaaaaaagagaaaacatactatgcaaaggaagtttaaacttaagttttccttaagggtcagcccaacaatgactttcagtcaaatggattaaactggaaaatgtttttgtttctgttgtaaacagatcatcctaggcgaaagttttttttgtttgtttgcttttaaattagtttatttctaaatcttagtcttccacatttctagaggccacctgacacaagtccctgtatctgaagtctagcatctcaaggctgatctggaagtgtgctagtatgctccctagtggataacttaatcttttaatacagttccgtcattcccatcttgttttcagaagagaaggtggctacagccaggcataacttatccactgtgtgcatagagggtctcttcacgttgatgcttggcattccatcagctttctctaagtctttgctcaagttcaaggttaaaatgatgttagacaacaggtcccagtcagtcccctctattttcacccattttgctcacaagccatattggcccgattagtggtactgtctgactcacgtgtgtgatccaaataaaggtagctgccgggaatt

SEQ ID NO: 137 - DNA, 3220 bp, Homo sapiens
gagctgtccccggtgccgccgacccgggccgtgccgtgtgcccgtggctccagccgctgccgcctcgatctcctcgtctcccgctccgccctcccttttccctggatgaacttgcgtcctttctcttctccgccatggaattctgctccgtgcttttagccctcctgagccaaagaaaccccagacaacagatgcccatacgcagcgtatagcagtaactccccagctcggtttctgtgccgtagtttacagtatttaattttatataatatatattatttattatagcatttttgatacctcatattctgtttacacatcttgaaaggcgctcagtagttctcttactaaacaaccactactccagagaatggcaacgctgattaccagtactacagctgctaccgccgcttctggtcctttggtggactacctatggatgctcatcctgggcttcattattgcatttgtcttggcattctccgtgggagccaatgatgtagcaaattcttttggtacagctgtgggctcaggtgtagtgaccctgaagcaagcctgcatcctagctagcatctttgaaacagtgggctctgtcttactgggggccaaagtgagcgaaaccatccggaagggcttgattgacgtggagatgtacaactcgactcaagggctactgatggccggctcagtcagtgctatgtttggttctgctgtgtggcaactcgtggcttcgtttttgaagctccctatttctggaacccattgtattgttggtgcaactattggtttctccctcgtggcaaaggggcaggagggtgtcaagtggtctgaactgataaaaattgtgatgtcttggttcgtgtccccactgctttctggaattatgtctggaattttattcttcctggttcgtgcattcatcctccataaggcagatccagttcctaatggtttgcgagctttgccagttttctatgcctgcacagttggaataaacctcttttccatcatgtatactggagcaccgttgctgggctttgacaaacttcctctgtggggtaccatcctcatctcggtgggatgtgcagttttctgtgcccttatcgtctggttctttgtatgtcccaggatgaagagaaaaattgaacgagaaataaagtgtagtccttctgaaagccccttaatggaaaaaaagaatagcttgaaagaagaccatgaagaaacaaagttgtctgttggtgatattgaaaacaagcatcctgtttctgaggtagggcctgccactgtgcccctccaggctgtggtggaggagagaacagtctcattcaaacttggagatttggaggaagctccagagagagagaggcttcccagcgtggacttgaaagaggaaaccagcatagatagcaccgtgaatggtgcagtgcagttgcctaatgggaaccttgtccagttcagtcaagccgtcagcaaccaaataaactccagtggccactcccagtatcacaccgtgcataaggattccggcctgtacaaagagctactccataaattacatcttgccaaggtgggagattgcatgggagactccggtgacaaacccttaaggcgcaataatagctatacttcctataccatggcaatatgtggcatgcctctggattcattccgtgccaaagaaggtgaacagaagggcgaagaaatggagaagctgacatggcctaatgcagactccaagaagcgaattcgaatggacagttacaccagttactgcaatgctgtgtctgaccttcactcagcatctgagatagacatgagtgtcaaggcagcgatgggtctaggtgacagaaaaggaagtaatggctctctagaagaatggtatgaccaggataagcctgaagtctctctcctcttccagttcctgcagatccttacagcctgctttgggtcattcgcccatggtggcaatgacgtaagcaatgccattgggcctctggttgctttatatttggtttatgacacaggagatgtttcttcaaaagtggcaacaccaatatggcttctactctatggtggtgttggtatctgtgttggtctgtgggtttggggaagaagagttatccagaccatggggaaggatctgacaccgatcacaccctctagtggcttcagtattgaactggcatctgccctcactgtggtgattgcatcaaatattggccttcccatcagtacaacacattgtaaagtgggctctgttgtgtctgttggctggctccggtccaagaaggctgttgactggcgtctctttcgtaacatttttatggcctggtttgtcacagtccccatttctggagttatcagtgctgccatcatggcaatcttcagatatgtcatcctcagaatgtgaagctgtttgagattaaaatttgtgtcaatgtttgggaccatcttaggtattcctgctcccctgaagaatgattacagtgttaacagaagactgacaagagtctttttatttgggagcagaggagggaagtgttacttgtgctataactgcttttgtgctaaatatgaattgtctcaaaattagctgtgtaaaatagcccgggttccactggctcctgctgaggtcccctttccttctgggctgtgaattcctgtacatatttctctactttttgtatcaggcttcaattccattatgttttaatgttgtctctgaagatgacttgtgatttttttttcttttttttaaaccatgaagagccgtttgacagagcatgctctgcgttgttggtttcaccagcttctgccctcacatgcacagggatttaacaacaaaaatataactacaacttcccttgtagtctcttatataagtagagtccttggtactctgccctcctgtcagtagtggcaggatctattggcatattcgggagcttcttagagggatgaggttctttgaacacagtgaaaatttaaattagtaacttttttgcaagcagtttattgactgttattgctaagaagaagtaagaaagaaaaagcctgttggcaatcttggttatttctttaagatttctggcagtgtgggatggatgaatgaagtggaatgtgaactttgggcaagttaaatgggacagccttccatgttcatttgtctacctcttaactgaataaaaaagcctacagtttttagaaaaaacccgaattc

SEQ ID NO: 138 - DNA, 835 bp, Homo sapiens
atggcgagcagcggagtcaagaacacaccacgatggcggagaaaagcccctcatgggagggaaaggaaagagaaaggaaagaaaagaaaaagatgtatctggtcaactccaaaaaggagacataagaaaaaaagcctcccaagagagatcattgatggcacttcagaaatgaatgaaggaaagaggtcccagaagatgcctagtacaccacgaagggtcacacaaggggcagcctcacctgggcatggcatccaagagaagctccaagtggtggataaggtgactcaaaggaaagacgactcaacctggaactcagaggtcatgatgagggtccaaaaggcaagaactaaatgtgcccgaaagtccagatcgaaagaaaagaaaaaggagaaagatatctgttcaagctcaaaaaggagatttcagaaaaatattcaccgaagaggaaaacccaaaagtgacactgtggattttcactgttctaagtcccccgtgacctgtggtgaggcgaaagggattttatataagaagaaaatgaaacacggatcctcagtgaagtgcattcggaatgaggatggaacttggttaacaccaaatgaatttgaagtcgaaggaaaaggaaggaacgcaaagaactggaaacggaatatacgttgtgaaggaatgaccctaggagagctgctgaagagtggacttttgctctgtcctccaagaataaatctcaagagagagttaaatagcaagtgaatttctactaccctctcagtcaccatgttgcagactttccctgtctggaggctcaccttagagcttctgagtttccaagcccggaatt

SEQ ID NO: 139 - DNA, 840 bp, Homo sapiens
ccggtgagtcgccggcgctgcagagggaggcggcactggtctcgacgtggggcggccagcgatgaagccgcccagttcaatacaaacaagtgagtttgactcatcagatgaagagcctattgaagatgaacagactccaattcatatatcatggctatctttgtcacgagtgaattgttctcagtttctcggtttatgtgctcttccaggttgtaaatttaaagatgttagaagaaatgtccaaaaagatacagaagaactaaagagctgtggtatacaagacatatttgttttctgcaccagaggggaactgtcaaaatatagagtcccaaaccttctggatctctaccagcaatgtggaattatcacccatcatcatccaatcgcagatggagggactcctgacatagccagctgctgtgaaataatggaagagcttacaacctgccttaaaaattaccgaaaaaccttaatacactgctatggaggacttgggagatcttgtcttgtagctgcttgtctcctactatacctgtctgacacaatatcaccagagcaagccatagacagcctgcgagacctaagaggatccggggcaatacagaccatcaagcaatacaattatcttcatgagtttcgggacaaattagctgcacatctatcatcaagagattcacaatcaagatctgtatcaagataaaggaattcaaatagcatatatatgaccatgtctgaaatgtcagttctctagcataatttgtattgaaaatgaaaccaccagtcgttatcaacttgaatgtaaatgtacatgtgcagatattcctaaagtgccttcgtggc

SEQ ID NO: 140 - DNA, 2439 bp, Homo sapiens
cagcacccagctccccgccaccgccatggtccccgacaccgcctgcgttcttctgctcaccctggctgccctcggcgcgtccggacagggccagagcccgttgggctcagacctgggcccgcagatgcttcgggaactgcaggaaaccaacgcggcgctgcaggacgtgcgggactggctgcggcagcaggtcagggagatcacgttcctgaaaaacacggtgatggagtgtgacgcgtgcgggatgcagcagtcagtacgcaccggcctacccagcgtgcggcccctgctccactgcgcgcccggcttctgcttccccggcgtggcctgcatccagacggagagcggcggccgctgcggcccctgccccgcgggcttcacgggcaacggctcgcactgcaccgacgtcaacgagtgcaacgcccacccctgcttcccccgagtccgctgtatcaacaccagcccggggttccgctgcgaggcttgcccgccggggtacagcggccccacccaccagggcgtggggctggctttcgccaaggccaacaagcaggtttgcacggacatcaacgagtgtgagaccgggcaacataactgcgtccccaactccgtgtgcatcaacacccggggctccttccagtgcggcccgtgccagcccggcttcgtgggcgaccaggcgtccggctgccagcgcggcgcacagcgcttctgccccgacggctcgcccagcgagtgccacgagcatgcagactgcgtcctagagcgcgatggctcgcggtcgtgcgtgtgtcgcgttggctgggccggcaacgggatcctctgtggtcgcgacactgacctagacggcttcccggacgagaagctgcgctgcccggagccgcagtgccgtaaggacaactgcgtgactgtgcccaactcagggcaggaggatgtggaccgcgatggcatcggagacgcctgcgatccggatgccgacggggacggggtccccaatgaaaaggacaactgcccgctggtgcggaacccagaccagcgcaacacggacgaggacaagtggggcgatgcgtgcgacaactgccggtcccagaagaacgacgaccaaaaggacacagaccaggacggccggggcgatgcgtgcgacgacgacatcgacggcgaccggatccgcaaccaggccgacaactgccctagggtacccaactcagaccagaaggacagtgatggcgatggtataggggatgcctgtgacaactgtccccagaagagcaacccggatcaggcggatgtggaccacgactttgtgggagatgcttgtgacagcgatcaagaccaggatggagacggacatcaggactctcgggacaactgtcccacggtgcctaacagtgcccaggaggactcagaccacgatggccagggtgatgcctgcgacgacgacgacgacaatgacggagtccctgacagtcgggacaactgccgcctggtgcctaaccccggccaggaggacgcggacagggacggcgtgggcgacgtgtgccaggacgactttgatgcagacaaggtggtagacaagatcgacgtgtgtccggagaacgctgaagtcacgctcaccgacttcagggccttccagacagtcgtgctggacccggagggtgacgcgcagattgaccccaactgggtggtgctcaaccagggaagggagatcgtgcagacaatgaacagcgacccaggcctggctgtgggttacactgccttcaatggcgtggacttcgagggcacgttccatgtgaacacggtcacggatgacgactatgcgggcttcatctttggctaccaggacagctccagcttctacgtggtcatgtggaagcagatggagcaaacgtattggcaggcgaaccccttccgtgctgtggccgagcctggcatccaactcaaggctgtgaagtcttccacaggccccggggaacagctgcggaacgctctgtggcatacaggagacacagagtcccaggtgcggctgctgtggaaggacccgcgaaacgtgggttggaaggacaagaagtcctatcgttggttcctgcagcaccggccccaagtgggctacatcagggtgcgattctatgagggccctgagctggtggccgacagcaacgtggtcttggacacaaccatgcggggtggccgcctgggggtcttctgcttctcccaggagaacatcatctgggccaacctgcgttaccgctgcaatgacaccatcccagaggactatgagacccatcagctgcggcaagcctagggaccagggtgaggacccgccggatgacagccaccctcaccgcggctggatgggggctctgcacccagcccaaggggtggccgtcctgagggggaagtgagaagggctcagagaggacaaaataaagtgtgtgtgcaggg

SEQ ID NO: 141 - DNA, 2261 bp, Homo sapiens
ccgcggttccggctgctccggcgaggcgacccttgggtcggcgctgcgggcgaggtgggcaggtaggtgggcggacggccgcggttctccggcaagcgcaggcggcggagtcccccacggcgcccgaagcgccccccgcacccccggcctccagcgttgaggcgggggagtgaggagatgccgacccagagggacagcagcaccatgtcccacacggtcgcaggcggcggcagcggggaccattcccaccaggtccgggtgaaagcctactaccgcggggatatcatgataacacattttgaaccttccatctcctttgagggcctttgcaatgaggttcgagacatgtgttcttttgacaacgaacagctcttcaccatgaaatggatagatgaggaaggagacccgtgtacagtatcatctcagttggagttagaagaagcctttagactttatgagctaaacaaggattctgaactcttgattcatgtgttcccttgtgtaccagaacgtcctgggatgccttgtccaggagaagataaatccatctaccgtagaggtgcacgccgctggagaaagctttattgtgccaatggccacactttccaagccaagcgtttcaacaggcgtgctcactgtgccatctgcacagaccgaatatggggacttggacgccaaggatataagtgcatcaactgcaaactcttggttcataagaagtgccataaactcgtcacaattgaatgtgggcggcattctttgccacaggaaccagtgatgcccatggatcagtcatccatgcattctgaccatgcacagacagtaattccatataatccttcaagtcatgagagtttggatcaagttggtgaagaaaaagaggcaatgaacaccagggaaagtggcaaagcttcatccagtctaggtcttcaggattttgatttgctccgggtaataggaagaggaagttatgccaaagtactgttggttcgattaaaaaaaacagatcgtatttatgcaatgaaagttgtgaaaaaagagcttgttaatgatgatgaggatattgattgggtacagacagagaagcatgtgtttgagcaggcatccaatcatcctttccttgttgggctgcattcttgctttcagacagaaagcagattgttctttgttatagagtatgtaaatggaggagacctaatgtttcatatgcagcgacaaagaaaacttcctgaagaacatgccagattttactctgcagaaatcagtctagcattaaattatcttcatgagcgagggataatttatagagatttgaaactggacaatgtattactggactctgaaggccacattaaactcactgactacggcatgtgtaaggaaggattacggccaggagatacaaccagcactttctgtggtactcctaattacattgctcctgaaattttaagaggagaagattatggtttcagtgttgactggtgggctcttggagtgctcatgtttgagatgatggcaggaaggtctccatttgatattgttgggagctccgataaccctgaccagaacacagaggattatctcttccaagttattttggaaaaacaaattcgcataccacgttctctgtctgtaaaagctgcaagtgttctgaagagttttcttaataaggaccctaaggaacgattgggttgtcatcctcaaacaggatttgctgatattcagggacacccgttcttccgaaatgttgattgggatatgatggagcaaaaacaggtggtacctccctttaaaccaaatatttctggggaatttggtttggacaactttgattctcagtttactaatgaacctgtccagctcactccagatgacgatgacattgtgaggaagattgatcagtctgaatttgaaggttttgagtatatcaatcctcttttgatgtctgcagaagaatgtgtctgatcctcatttttcaaccatgtattctactcatgttgccatttaatgcatggataaacttgctgcaagcctggatacaattaaccattttatatttgccacctacaaaaaaacacccaatatcttctcttgtagactatatgaatcaattattacatctgttttactatgaaaaaaaaattaatactactagcttccagacaatcatgtcaaaatttagttgaactggtttttcagtttttaaaaggcctacagatgagtaatgaagttaccttttttgtttaaaaaaaaaaaag

SEQ ID NO: 142 - DNA, 1488 bp, Homo sapiens
cgcgacggctgagcaaggactctccagtcctcagtcaccttggacaaagaagtgtggatcctcagattccatcttttccaactccaaggtgccatggcagagaaggtgctggtaacaggtggggctggctacattggcagccacacggtgctggagctgctggaggctggctacttgcctgtggtcatcgataacttccataatgccttccgtggagggggctccctgcctgagagcctgcggcgggtccaggagctgacaggccgctctgtggagtttgaggagatggacattttggaccagggagccctacagcgtctcttcaaaaagtacagctttatggcggtcatccactttgcggggctcaaggccgtgggcgagtcggtgcagaagcctctggattattacagagttaacctgaccgggaccatccagcttctggagatcatgaaggcccacggggtgaagaacctggtgttcagcagctcagccactgtgtacgggaacccccagtacctgccccttgatgaggcccaccccacgggtggttgtaccaacccttacggcaagtccaagttcttcatcgaggaaatgatccgggacctgtgccaggcagacaagacttggaacgtagtgctgctgcgctatttcaaccccacaggtgcccatgcctctggctgcattggtgaggatccccagggcatacccaacaacctcatgccttatgtctcccaggtggcgatcgggcgacgggaggccctgaatgtctttggcaatgactatgacacagaggatggcacaggtgtccgggattacatccatgtcgtggatctggccaagggccacattgcagccttaaggaagctgaaagaacagtgtggctgccggatctacaacctgggcacgggcacaggctattcagtgctgcagatggtccaggctatggagaaggcctctgggaagaagatcccgtacaaggtggtggcacggcgggaaggtgatgtggcagcctgttacgccaaccccagcctggcccaagaggagctggggtggacagcagccttagggctggacaggatgtgtgaggatctctggcgctggcagaagcagaatccttcaggctttggcacgcaagcctgaggaccctcccctaccaaggaccaggaaaagcagcagctgcctgctctccagcctctggaggaactcagggccctggagctgctggggccaagccaagggcctcccctacctcaaaccccagctgggcccgcttagcccaccaggcatgaggccaaggctccactgaccaggaggccgaggtctctaactcttatcttccacagggtccaagagttcatcaggacccccaagagtgagtgagggggcaaggctctggcacaaaacctcctcctcccaggcactcatttatattgctctgaaagagctttccaaagtatttaaaaataaaaacaagttttcttacactgg

SEQ ID NO: 143 - DNA, 4839 bp, Homo sapiens
tccggtttttctcaggggacgttgaaattatttttgtaacgggagtcgggagaggacggggcgtgccccgcgtgcgcgcgcgtcgtcctccccggcgctcctccacagctcgctggctcccgccgcggaaaggcgtcatgccgcccaaaaccccccgaaaaacggccgccaccgccgccgctgccgccgcggaacccccggcaccgccgccgccgccccctcctgaggaggacccagagcaggacagcggcccggaggacctgcctctcgtcaggcttgagtttgaagaaacagaagaacctgattttactgcattatgtcagaaattaaagataccagatcatgtcagagagagagcttggttaacttgggagaaagtttcatctgtggatggagtattgggaggttatattcaaaagaaaaaggaactgtggggaatctgtatctttattgcagcagttgacctagatgagatgtcgttcacttttactgagctacagaaaaacatagaaatcagtgtccataaattctttaacttactaaaagaaattgataccagtaccaaagttgataatgctatgtcaagactgttgaagaagtatgatgtattgtttgcactcttcagcaaattggaaaggacatgtgaacttatatatttgacacaacccagcagttcgatatctactgaaataaattctgcattggtgctaaaagtttcttggatcacatttttattagctaaaggggaagtattacaaatggaagatgatctggtgatttcatttcagttaatgctatgtgtccttgactattttattaaactctcacctcccatgttgctcaaagaaccatataaaacagctgttatacccattaatggttcacctcgaacacccaggcgaggtcagaacaggagtgcacggatagcaaaacaactagaaaatgatacaagaattattgaagttctctgtaaagaacatgaatgtaatatagatgaggtgaaaaatgtttatttcaaaaattttataccttttatgaattctcttggacttgtaacatctaatggacttccagaggttgaaaatctttctaaacgatacgaagaaatttatcttaaaaataaagatctagatgcaagattatttttggatcatgataaaactcttcagactgattctatagacagttttgaaacacagagaacaccacgaaaaagtaaccttgatgaagaggtgaatgtaattcctccacacactccagttaggactgttatgaacactatccaacaattaatgatgattttaaattcagcaagtgatcaaccttcagaaaatctgatttcctattttaacaactgcacagtgaatccaaaagaaagtatactgaaaagagtgaaggatataggatacatctttaaagagaaatttgctaaagctgtgggacagggttgtgtcgaaattggatcacagcgatacaaacttggagttcgcttgtattaccgagtaatggaatccatgcttaaatcagaagaagaacgattatccattcaaaattttagcaaacttctgaatgacaacatttttcatatgtctttattggcgtgcgctcttgaggttgtaatggccacatatagcagaagtacatctcagaatcttgattctggaacagatttgtctttcccatggattctgaatgtgcttaatttaaaagcctttgatttttacaaagtgatcgaaagttttatcaaagcagaaggcaacttgacaagagaaatgataaaacatttagaacgatgtgaacatcgaatcatggaatcccttgcatggctctcagattcacctttatttgatcttattaaacaatcaaaggaccgagaaggaccaactgatcaccttgaatctgcttgtcctcttaatcttcctctccagaataatcacactgcagcagatatgtatctttctcctgtaagatctccaaagaaaaaaggttcaactacgcgtgtaaattctactgcaaatgcagagacacaagcaacctcagccttccagacccagaagccattgaaatctacctctctttcactgttttataaaaaagtgtatcggctagcctatctccggctaaatacactttgtgaacgccttctgtctgagcacccagaattagaacatatcatctggacccttttccagcacaccctgcagaatgagtatgaactcatgagagacaggcatttggaccaaattatgatgtgttccatgtatggcatatgcaaagtgaagaatatagaccttaaattcaaaatcattgtaacagcatacaaggatcttcctcatgctgttcaggagacattcaaacgtgttttgatcaaagaagaggagtatgattctattatagtattctataactcggtcttcatgcagagactgaaaacaaatattttgcagtatgcttccaccaggccccctaccttgtcaccaatacctcacattcctcgaagcccttacaagtttcctagttcacccttacggattcctggagggaacatctatatttcacccctgaagagtccatataaaatttcagaaggtctgccaacaccaacaaaaatgactccaagatcaagaatcttagtatcaattggtgaatcattcgggacttctgagaagttccagaaaataaatcagatggtatgtaacagcgaccgtgtgctcaaaagaagtgctgaaggaagcaaccctcctaaaccactgaaaaaactacgctttgatattgaaggatcagatgaagcagatggaagtaaacatctcccaggagagtccaaatttcagcagaaactggcagaaatgacttctactcgaacacgaatgcaaaagcagaaaatgaatgatagcatggatacctcaaacaaggaagagaaatgaggatctcaggaccttggtggacactgtgtacacctctggattcattgtctctcacagatgtgactgtataactttcccaggttctgtttatggccacatttaatatcttcagctctttttgtggatataaaatgtgcagatgcaattgtttgggtgattcctaagccacttgaaatgttagtcattgttatttatacaagattgaaaatcttgtgtaaatcctgccatttaaaaagttgtagcagattgtttcctcttccaaagtaaaattgctgtgctttatggatagtaagaatggccctagagtgggagtcctgataacccaggcctgtctgactactttgccttcttttgtagcatataggtgatgtttgctcttgtttttattaatttatatgtatatttttttaatttaacatgaacacccttagaaaatgtgtcctatctatcttccaaatgcaatttgattgactgcccattcaccaaaattatcctgaactcttctgcaaaaatggatattattagaaattagaaaaaaattactaattttacacattagattttattttactattggaatctgatatactgtgtgcttgttttataaaattttgcttttaattaaataaaagctggaagcaaagtataaccatatgatactatcatactactgaaacagatttcatacctcagaatgtaaaagaacttactgattattttcttcatccaacttatgtttttaaatgaggattattgatagtactcttggtttttataccattcagatcactgaatttataaagtacccatctagtacttgaaaaagtaaagtgttctgccagatcttaggtatagaggaccctaacacagtatatcccaagtgcactttctaatgtttctgggtcctgaagaattaagatacaaattaattttactccataaacagactgttaattataggagccttaatttttttttcatagagatttgtctaattgcatctcaaaattattctgccctccttaatttgggaaggtttgtgttttctctggaatggtacatgtcttccatgtatcttttgaactggcaattgtctatttatcttttatttttttaagtcagtatggtctaacactggcatgttcaaagccacattatttctagtccaaaattacaagtaatcaagggtcattatgggttaggcattaatgtttctatctgattttgtgcaaaagcttcaaattaaaacagctgcattagaaaaagaggcgcttctcccctcccctacacctaaaggtgtatttaaactatcttgtgtgattaacttatttagagatgctgtaacttaaaataggggatatttaaggtagcttcagctagcttttaggaaaatcactttgtctaactcagaattatttttaaaaagaaatctggtcttgttagaaaacaaaattttattttgtgctcatttaagtttcaaacttactattttgacagttattttgataacaatgacactagaaaacttgactccatttcatcattgtttctgcatgaatatcatacaaatcagttagtttttaggtcaagggcttactatttctgggtcttttgctactaagttcacattagaattagtgccagaattttaggaacttcagagatcgtgtattgagatttcttaaataatgcttcagatattattgctttattgcttttttgtattggttaaaactgtacatttaaaattgctatgttactattttctacaattaatagtttgtctattttaaaataaattagttgttaagagtcttaatggtctgatgttgtgttctttgtattaagtacactaatgttctcttttctgtctaggagaagatagatagaagataactctcctagtatctcatcc

SEQ ID NO: 144 - DNA, 634 bp, Homo sapiens
cggctgagaggcagcgaactcatctttgccagtacaggagcttgtgccgtggcccacagcccacagcccacagccatgggctgggacctgacggtgaagatgctggcgggcaacgaattccaggtgtccctgagcagctccatgtcggtgtcagagctgaaggcgcagatcacccagaagattggcgtgcacgccttccagcagcgtctggctgtccacccgagcggtgtggcgctgcaggacagggtcccccttgccagccagggcctgggccctggcagcacggtcctgctggtggtggacaaatgcgacgaacctctgagcatcctggtgaggaataacaagggccgcagcagcacctacgaggtccggctgacgcagaccgtggcccacctgaagcagcaagtgagcgggctggagggtgtgcaggacgacctgttctggctgaccttcgaggggaagcccctggaggaccagctcccgctgggggagtacggcctcaagcccctgagcaccgtgttcatgaatctgcgcctgcggggaggcggcacagagcctggcgggcggagctaagggcctccaccagcatccgagcaggatcaagggccggaaataaaggctgttgtaagagaat

SEQ ID NO: 145 - DNA, 13500 bp, Homo sapiens
  misc_feature (1)...(13500): n=a,t,g or c
aagcttccttcttggaattccaaactaataaatgagctaactccgccccagccccttagtccctccctgcaatccacctacctctgcagacatcttcttccaaggaaccttgcttgggaaacccacaccagacacatccatcatggcgtctacagccgcatgggcgtgcgtccctctgtttatatggccagagccccgcctcgctccgcccctttaaacttggtgggcggaccgaggcggggctcagaccaggccccaccccgatcagccacgtccatcgccctgatttccaggccctcccagtccctgggcgcacgtcccggattcctcccacgagggggcgggctgcggccaaatctcccgccaggtcagcggccgggcgctgattggccccatggcggcggggccggctcgtgattggccagcacgccgtggtttaaagcggtcggcgcgggaccaggggcttactgcgggacggccttggagagtactcgggttcgtgaacttcccggaggcgcaatgagctgcattaacctgcccactgtgctgcccggctcccccagcaagacccgggggcagatccaggtgcgggggccagccctgcgcgtggctggggatgaggtggtcgtggtgatagcctgtgtccaggcatccgcgcagggcgggccctcaaatgacctcaccttctctcctaggtgattctcgggccgatgttctcaggaaaaaggtaatggcttcgcggggctggggtggagctccttcctcttctccggggaccccttgtccctcccctcccctcccctcccctcccctcccctcccctccccttccctccccttcccttccctccccttcccttcccctagaaggaccagcacagcctcctacagctcccgcccggggtgctcctcccttgaattcagtccaggaggaagtctctgccctcttctgcccaggccaagcccctcgtcctgtgtggacgccactccctcctggagctggtgacagctgcttacagcttagctgtcttccccaccaagtcctctgagaaggtggcaaccagttgtgtcccctgtaggccaggcctttttgtacacccctattcaatgtggctgtttccttctaaggccaaggaaacgtagtcgctttctaaaccaaggagtctgaagccgtggagcctctgctctcctgaggtgatagaaccattccctgacccgggtggggctagtgagtttcttgagtaaactacccacgcaccattctttttgttttgtttttgttcttctagaggtaggatcttgctatgttgcccaggctggtctcaaactcctgggctcaagcaattctctcacctcagcctcccaagtagctgggactacaggcgtgcaccccccccgcctccacccagctaattttattttatttttatagagctggggtcttgctatgttgcccaagctggtcttgaactcctggtctcaagcaatcctcctacttcagcatcccaaagtgctgggattacagatgttagccaccatgccctgccccaacattcttttatggccctggggatcacttcagctcaaaccccttgctcaggaagatgtggctcagagttggacttcttggacccagaagcaagtgcttttgacgctgcacacaaagactttctgaaattaatttagaaaagctgtatgccaggtgtggtggcccacgcctttaatcccagcgctttggaaggctgaggtgcgttgatcacttgaggttaggagtttgagaccaccctggtcaacgtggtgaaaccccatctctactgaaaaaaaaaaccaaaaattatctgggcatggtggcagcctcctgtaatcccagctactcgggaggttgaggcaggagaatctcttgaacccggaaggcaggggttgcagtgagctgagatcgctccactgcactctaacctaggcaacagagcgagactccaccccaaaaagaaagaaagaaaaactctgaactctgggaacaactctgggatgaggttactttggaatgcagtcgcaggttccctctacatgtagcctttgcttctgccttccccactacatcttggagaaggttactcctcccacacttcctgggaccacctgagtaccattcctggacctcttccccatagagaattctgacttccaaccctctttgtagggatattataccctgcctgctctgccctgctcttttctggctgtggtgggctcagtctgcataccactagggacaatgaggagccaggcttgttggggaggggtctccttctcccactcctcccgccgtggacctcacctgaccctctctcctcttgcagcacagagttgatgagacgcgtccgtcgcttccagattgctcagtacaagtgcctggtgatcaagtatgccaaagacactcgctacagcagcagcttctgcacacatgaccggtcagtccctgccccctgcagtcctgtccagtggaaaatcacaaggcacaggacacactgttaggactctctttaatggggatggttaatcatttgaacattgaatgattcaaatcagcacactttccaaggtgcttggcaaggtagcgcacactctccactccctgggctggagccagtggttctccactgagggtgattttgccgccagggtccatttgacaatgtttgaagacatttctagttgttgcaactggaggggggaggggatgcttttgggctttaatgtgtagaaatcagggacactgctgctaagggtcctatggtgcagaggacggcccccatgcaagaacgagctggccccaaatgtcaggagcctgccagtgttcagaaactctgccgtagggtttcagcttcacacaggctgcagactggtttggtttggcctgcacgttgatttttgtttaattttttagttgtccgttgttggctggctcccccgtcacctggcagccttcacgcttccctgttttatgtgtagctgtttgagctcgctggacatttccgcctgcaacctcagtttgggagttaaattcacttccttggcagcagatgtgggcccgatgtttctgagcctgagacgctttgcttggtcctctggacttgtccacctgggcacccagtggcaaagccatgctgtgccacacattatagggcttcagcctcagagccctggctgggagctgtatccgagagttgctatggctgtgcagagaacagatccacccggcgtgtggccttcggtgggagctgaggggctcctgaagccagatgctggtggagtggagggtgcttggggcttggagttgcatgtgggaatttaaccgcaccttcgtgaccatgctgtctgatgtaggtcatttacttttccaaatttgcttcctcattcctaagatgcgatgtccacggcacagggtggtgttacacctggtggggacagggaaagcagaggaggtcacttcgttccagctgttggaagtacaacttctggagtcagtcagatccgggattaaatatgagttctgcccgtgtgtcacaagtcatctctaacacgggccacagaggccaaggctgggccagcagcattgatggctcgagaggctgcccttgcaggggccacagctggcctcccacctgccctcactttgtctttctctgtttagggagggaagagggaatttaaaatgcccaaaatactgtttcacacattctttccagaactcgaagtaggattatagcaaggtaataacgaaacaatagttgtaaagtatgtttttttgtttgtttgttgtttgtttttgggacagggtctctctctgtcacccaggctggagtgcagtggctcaatcatagcttactgttacgtgaccccaaacccttgggctcaagtgatcgtcccacctcagccccctgagcaggtgggactacaggcgcacaccaccacacccagttaatttttacatttttttcacacagtgtctcgctgtgttacccaggctggtctcgaactcctgagttcaagtgatcctcccgtcttggcctccccaaagattacgggcatgagctgctgtgtctggccagaatacaggattttaaaaatttatgttttgcaacataattaatataaagacaaatataacccaggcccagttctagttattcattcttctgaattttaaaaggaaacatttggctggcccctaatggtatcatgggccctggtacctgatgaagttggcctagtctgcccccagctcctgaacagtggaagagtttttagtctcattgagctttgtactggacattactaatttctaatccaaagcatcaagtgaagtggcttgtataaataactggttttcctctgggaggctaaggcgggtggatcacttaaaagttaggagtctgagaccagcctggccaacatggtgaaaccccatgtctgctaaaaatacaaaaattagctgggtgtgatggtgtgtggccagtagtcccagctactcttgtggctgaggtgggagaatcgcttgagacccttgagaattgggaggtagagattgcagggagccgagatggcgccactgcactccagcctgggtgacagagcaagactctgtttcataaaaaataaataaataactggttttctggacgagggcctttcccataggtgctaacttctcaaagcccggctgggtgaacactgagcctgctttgcaggtagcaggtggtcacgacagtgccattccctggcccctgcattgtggcttctggcctccctggccctgctcacgctctggctttctcttcccaggaacaccatggaggcgctgcccgcctgcctgctccgagacgtggcccaggaggccctgggcgtggctgtcataggcatcgacgaggggcagtttgtaagttggcttgtcttggcatcactcttcctgccttccgctgtgtcctcccgttttccctcgctgacttggaagttatctganncttttagtaaaataacaaggttaaatagctacaactagtgttggaataccctctgaaggcccctttctagtttccctgtcatagtgtcatagtcttgtaggattcgttttactttttttttttttttttttgagacggagttttgctcttgttgcccaggccggagtacgatggcacaatctcaccgcaaactttgcttcctgggttcaagcaattctctcctgtctcagcctcccgagtagctgggattacaggcatgcgccaccacgcccagctaattttatatttttagtagagatggggtttctccatgttggtcaagctggtctcaaactcccaacctcaggtgatccgccccgccttgaactcccaaagcgctgggattacaggcatgagctaccacacctggccattgtacctttttaaaaatacatatatctatttactggcaagatgcagtgactcacacctgtaatctcagcctgtgggaggccaaggtggacagatcacttgagcccaggagttggagactcacctgggcaacatagtaaaaccccatctctaccaaaaaaaaaaagaaattagccagtcatagcagcgcacacctgtggtccctgctactcaggaggctgaggcagaaggatggagcctgggaggtcgaggctgcagtgagtggtgatagcaccactgcactccagcccgggcgacaaggccagaccctgtctcaaaaaaaaaagggggaggtggggagtaatgtttggtttgcctcatggttccttttgcttgtttcttatacgtttattttcttgttgttgaagtaccttttttagtagtttttgcagccaggaggtatagatgggaagctgccagtctttgtatggaaatctttcttttgtcatctagtttaagctgggcagcaagaggtaggttgatcttgtgtgggtttgggtttttttttttttttgagacggagtcttactctgtcgcccaggctggagtgcaatggtgtgatctcggctcactgcaacctctgccacccggattcaagcgattttcccacctcgcctcccaagtaggtgggattacaggcacccaccatcatgcctggctaatttttgtagagacaagggttcaccatgttggctaggctggtcttgaactcctgacctcaggtgatccacccgccttggcttcccaaagtgttggaattacaggcatgagccgccgtgcccggccttttttatttttattttttttgagatggagtcttgctctgttgccctggctggagtggagtgacgtgatcttagctcacagcaacctccgccttttgggttcaagcagttctgcctcatccttccgggtagctgggatcacaggtgcgtgccacatgcgtamtcatttatgtatttttaatagagatggggtttcaccatgttggccagctggtctggaactcctgacctcaggtgatccgcatgcctcagctcccaaagtgctgggattacaggcgtgaaccacgcctggtcttgatcttgttgctttgaaaagtagcagcgctggtcattgtgtttttgctcagaggaaggccgccatctctctaatgttacctctggtcaggtattctatctgttctctctcagcacaatgtgtgtaggggaagctttgtttcatttatcctgctttatagctggtgtgccttttcatttctggggaaggaatgaagccattatcacttcaggtatttctctcctcatccatctctgaggtgttctgggttccatcttccagagtgtgttttgtttcagtgactatttttacatctgctgctctaattcatcatgctccgttttgtttgacaagttactgttgggttatttttaaatttatgctgttccttccattatgttcctgaaaatcttttcttagacttttccagatttttctatttcctcaggaacatattctgtggttgagtttctgggttattttctgttatcttagttttctttcctctgctttggagattttatttttgttagtttatcacaaagaatgaaactgaaactctctccaaggggtttagcagacttgacctcttaggtacttttagggttgcctcgaagtacacaatgtggtggtttgatataaacataacaggaatttatttctcgctcacagaccccctacgtggttccaggccggttgatggggaggccgcccacgaggcggcttaggtcgccctggctggctgtatacagacacggaggggaagagacgtggcggagcccctgggtgtgaggttttcatgggcctgaccagaagctgcaaacgtcacttctgctgatctttcaaagactagaacctgggcacagggccacctatacgtttagtatacttagtccagttcgttttttgtttgtttttaaaaacagtcttgctctgtggcccaggctggagtgcagtggcgcagtctcggctcactataacctccatgtcccaggttcaagtgattctcccgcctcagcctcctgagtagctgggattacaggcttctgccaccatgcccagctaaccttttgtatttttagtagagacggggtttcatcatgttgaccgggctggtctggaactcctaacctcaggtgatctgcctgcctcagcctcccaaagtgctgggattacagcgtgagccaccacgcctggccacacttagtctagttctataccctggaggaagaataaatgagtttgtttggtgagtgcttcaaggtctctacccgccctgcctcccagcacagagccaggccgctctggcctgaataccctgcccggacgtcacagggcctgtcccctcaaaaggccagtcctgccttcctggttctgttcttgcccaacattctgtatgagtcacagctgcaaattccattcccgtggggaggctgacgggtcccttcccctgtgcggggcatctgccctgtggagttgaggctgccagtgtccgctctgggttcccgaccacccggcagctggcatctcctccccgcttgggtatggccattccgtttctgaccttcagaggtgcgcccctgagcacccccatgcctctgcgtacgtggagacgtcgttgttgctgccccgtgcttgagggactcctggcgagaaagtgagcccaggctgggaatagggctgcagctgttctcttttgctcccaaactgtggcctcagaatgcatccagggattttgcatcagctttggggacatggccctctcagaacaaggaagcttcagctttggcaaggctctccctccttcagacctgccgctgtgagttgttcaatagctctgttctcctggctctgcgtaaaccttgttgacagaggctgacccagacccccgaggcagaaacctttcccttctccttcctcgacatccaaatgccctgagtcaggagccagcgtatgaagtcctgtcccctgttcagcctgtaggagggatttctcggtctacttcctccctggccagcaagtaaaacttgagttcattcagtgagtatttattacaccctacccagacatcagcattctgccctggcctctgtgtgcccttgttctcttcaagaagttccgggtcaccagcctgaccaacatggagaaactccgtctctactaaaaatacaaaaattagccgggcgtggtggcgcactgcctgtaatcccagctacttgggaggctgaggcaggagaatcgcttgaacccggtaggcgaaggttgcagtgagccaagatcgccccattgcactccaagcctgggcaacaacaagagcaaaactcagtctcaaaacaaaacaaaacaaaagaagttcagggtcttcccattgcaagcagttctagatcgaggagaggggttcctagcatgggacccagcagaaggactgtccttcgctccttcattgtctacgtggacagtggatgaagctcagccgaacctgccttgttcccgttttctgggtcagcagggaaagcctttcacagagtagccaccgtgccatcctgaggaaggccctgggtcagaagcttctgtgcttctttgtaccccgggcaagacacacaggtgctcacactgctctgtagaaactgttggcatccaagagagactcacctggaaatctctggaaaacctgaagctcctagctgggggtgctgtgcttcagatgctggtggtgggtgggcacccttgcatcaacagctgcacagtgtgtggtgggcttgcagggtcgcttggcaatagtaggagctctgatttatttttttaaactttttttctggctgggcaggtggctcacacctgtaatcccagcactttggaaggcctaggcgggcggatcacttgaggtcaggagtttgagaccagccaggccaacatggtgaaaccccatctctactaaaaatacaaaaattagccaagcgtggtggcacacacctgtaattccagctacttgggaggcagaggcacaagaattgcttgaacctgggaggcagaggttgcagtgagccaagattatgccactgcactccagcctggatgacagagcgagactctgtctcaaaaaaaatagacaaagccaggcgcagtggctcatgcctgtaatcccaacactttgggaggccgaggtgggtgaatcacgaggtcaggagatcgagaccatcctggctaacacggtgaaaccccgtctctactgaaaatacaaaaaaattagccaggcgtggtggtgggcacctgtagtctcagctactcgggaggctgaggcaggagagtggcgtgaacccaggaggcggagcttgcagtgagctgagatcacgccactgcactccagcctgggcgacagagcgagactccgtctcaaaaaaaaaaaaaaaatagacctttttgtgttttctgttctactacacaagtaatacaggttgagtattccttaacctaaatgcctgggaccagaagtgtttcggatttcaggttttcgaatatttgcatgttcataatataatgagaccttgggaatgagccccaagtgtaaacacaaaatccatttatgttttatagacatcttaggcacatagcctgagagtaattttatgtatttagtaatttgggcgtgagccacagtttttgactgtgacctgtcccatgaggtcaggtgtggaattttccacttgtggtgggcgctcaaaaagtttcagattttggagcctttcaggttagagacatgcaatctataataagtttaatctaggaaaagttagggtctggcacagaggctcacgtctgtgatcccagcactttgggaggctgaggcaggcagatcactggaagtgctggacgggtggggaagtgccgggtgcaagaaccaagctctttgactatggacctcagcctgaggttggtcaagaggtggagtgagtgggggctgaggaccttcatcctgaaaccctgatgcaggagagtctggggtctgccttctaccctcatgtggcgggtgaaggagcaaggttctcaactcaggagggttcttcccctctccattcccacccaggggacatctcacaacaactagaaacaattttgtcgcagctggggggtgggaggtgtgttcctggcatctatctaatgggtgggggcgagggacgcagcccaacaccctacagtgcacaggacacagcgagatccggcctcaaactggcagccatggcagcgtcagccctccagggggcgcgccctggcgcaggtggtgtgccggcccacagctccttgcaggctgggagctgcattttcgtgacatgtcatgagtcctcagagaaaaagagggaacgagtgcatggtggggaggggccctggcgtgctggagtctctgggtttccttctccagagacccctgcagtcagctgagcgcaatcagtcacgttgggctttgcttggatctcactggaatttttcgagccaccccttagtcctcaccttgctaagccctcacgtctcaataacctcaaacctcagtacctgggctgagaaagcctgagtggccctgggagagagaccctgcacccaaggacaaggacatccctgcttcacccaacccaaaggccagtctggacatatgaactcaaccagctaagagtgatatgattgattgatgagaatcaccagagcacttgccagagtttcagcttctccctgggccaaagtgaagtttgctttacacagtaaatgtgctctgtgcaggtcctgaatttagaaggctgtgctgtgtcatcctgctctgtaaatggccagtaggacccccgccccttctcaaggcacattacccgtttaaaacgggggaggcaagagcacaaagcgcccacctattcaccgaagagcatgtatataacttagggccttccatccttaaacaacaggaccttccttgctcttacggaaaaggaaacaggttcagagacgttaattcattgccaaggtcacacagataatgggtccagcgaagagtggtgtccgagcccaaggcagcaggcctttggccactgcagtgttaaacagcacagctggtgtggaagtccggtgctgagtcctgggtacctggactcggagggaagctggctgcagggggaaggggctgcgcagttgtggatgtacctgtcgtctgctggggggcgtgcgggtggacacagtcccccggcctggggagcctcgtgggagaattaagagttactccgggccaaatggccggagttgtcagatctggcagcgtcttcgctggggctccagggagctgctgctggggtggaagctctcacactctttctccacgtgccctttccagttccctgacatcatggagttctgcgaggccatggccaacgccgggaagaccgtaattgtggctgcactggatgggaccttccagaggaaggtaaggcgtctgatccaggtctggagctgggattgaggagggcaagaggcttctggatgggcacagagacaccagctctgggtgaccagggctcagccaccacagggttacggccgagctgctcaggcttggctgagccaagggactccatggtctgtgcagactgcgtgccatctgttgtggcaggtgctttgaattggcaaagggacagagccgggcatggtgctctgggggttgggggaaggactaaggtcagagcaaactctcctggcttcagtacttgtgaatcagagggtttaaaagaaaaacccacctggtaaggtgctgagcgccctctgtctttccatgggagcacagccatttggggccatcctgaacctggtgccgctggccgagagcgtggtgaagctgacggcggtgtgcatggagtgcttccgggaagccgcctataccaagaggctcggcacagagaaggaggtagctccacctgccttccctgcaggccggcggggtgggggtatggctctgcctccttcctgtcctggcccttcacccatcccctgtccctgcggccaggtcgaggtgattgggggagcagacaagtaccactccgtgtgtcggctctgctacttcaagaaggcctcaggccagcctgccgggccggacaacaaagagaactgcccagtgccaggaaagccaggggaagccgtggctgccaggaagctctttgccccacagcagattctgcaatgcagccctgccaactgagggacctgcaagggccgcccgctcccttcctgccactgccgcctactggacgctgccctgcatgctgcccagccactccaggaggaagtcgggaggcgtggagggtgaccacaccttggccttctgggaactctcctttgtgtggctgccccacctgccgcatgctccctcctctcctacccactggtctgcttaaagcttccctctcagctgctgggacgatcgcccaggctggagctggccccgcttggtggcctgggatctggcacactccctctccttggggtgagggacagagccccacgctgttgacatcagcctgcttcttcccctctgcggctttcactgctgagtttctgttctccctgggaagcctgtgccagcacctttgagccttggcccacactgaggcttaggcctctctgcctgggatgggctcccaccctcccctgaggatggcctggattcacgccctcttgtttccttttgggctcaaagcccttcctacctctggtgatggtttccacaggaacaacagcatctttcaccaagatgggtggcaccaaccttgctgggacttggatcccaggggcttatctcttcaagtgtggagagggcagggtccacgcctctgctgtagcttatgaaattaactaattgaaaattcactggttggtggacgcacatttctctttcacctgggtttccctgggtctcatggacagctccaacttgatttggg

SEQ ID NO: 146 - DNA, 1160 bp, Homo sapiens
cctccgacagcctctccacaggtaccatgaaggtctccgcggcacgcctcgctgtcatcctcattgctactgccctctgcgctcctgcatctgcctccccatattcctcggacaccacaccctgctgctttgcctacattgcccgcccactgccccgtgcccacatcaaggagtatttctacaccagtggcaagtgctccaacccagcagtcgtctttgtcacccgaaagaaccgccaagtgtgtgccaacccagagaagaaatgggttcgggagtacatcaactctttggagatgagctaggatggagagtccttgaacctgaacttacacaaatttgcctgtttctgcttgctcttgtcctagcttgggaggcttcccctcactatcctaccccacccgctccttgaagggcccagattctgaccacgacgagcagcagttacaaaaaccttccccaggctggacgtggtggctcagccttgtaatcccagcactttgggaggccaaggtgggtggatcacttgaggtcaggagttcgagacagcctggccaacatgatgaaaccccatgtgtactaaaaatacaaaaaattagccgggcgtggtagcgggcgcctgtagtcccagctactcgggaggctgaggcaggagaatggcgtgaacccgggagcggagcttgcagtgagccgagatcgcgccactgcactccagcctgggcgacagagcgagactccgtctcaaaaaaaaaaaaaaaaaaaaaaaaaatacaaaaattagccgcgtggtggcccacgcctgtaatcccagctactcgggaggctaaggcaggaaaattgtttgaacccaggaggtggaggctgcagtgagctgagattgtgccacttcactccagcctgggtgacaaagtgagactccgtcacaacaacaacaacaaaaagcttccccaactaaagcctagaagagcttctgaggcgctgctttgtcaaaaggaagtctctaggttctgagctctggctttgccttggctttgcaagggctctgtgacaaggaaggaagtcagcatgcctctagaggcaaggaagggaggaacactgcactcttaagcttccgccgtctcaacccctcacaggagcttactggcaaacatgaaaaatcgggg

SEQ ID NO: 147 - DNA, 1452 bp, Homo sapiens
ttggtttctgctgggtgtaggtccttggctggtcgggctccggtgttctgcttctccccgctgagctgctgcctggtgaagaggaagccatggcgctccgagtcaccaggaactcgaaaattaatgctgaaaataaggcgaagatcaacatggcaggcgcaaagcgcgttcctacggcccctgctgcaacctccaagcccggactgaggccaagaacagctcttggggacattggtaacaaagtcagtgaacaactgcaggccaaaatgcctatgaagaaggaagcaaaaccttcagctactggaaaagtcattgataaaaaactaccaaaacctcttgaaaaggtacctatgctggtgccagtgccagtgtctgagccagtgccagagccagaacctgagccagaacctgagcctgttaaagaagaaaaactttcgcctgagcctattttggttgatactgcctctccaagcccaatggaaacatctggatgtgcccctgcagaagaagacctgtgtcaggctttctctgatgtaattcttgcagtaaatgatgtggatgcagaagatggagctgatccaaacctttgtagtgaatatgtgaaagatatttatgcttatctgagacaacttgaggaagagcaagcagtcagaccaaaatacctactgggtcgggaagtcactggaaacatgagagccatcctaattgactggctagtacaggttcaaatgaaattcaggttgttgcaggagaccatgtacatgactgtctccattattgatcggttcatgcagaataattgtgtgcccaagaagatgctgcagctggttggtgtcactgccatgtttattgcaagcaaatatgaagaaatgtaccctccagaaattggtgactttgcttttgtgactgacaacacttatactaagcaccaaatcagacagatggaaatgaagattctaagagctttaaactttggtctgggtcggcctctacctttgcacttccttcggagagcatctaagattggagaggttgatgtcgagcaacatactttggccaaatacctgatggaactaactatgttggactatgacatggtgcactttcctccttctcaaattgcagcaggagctttttgcttagcactgaaaattctggataatggtgaatggacaccaactctacaacattacctgtcatatactgaagaatctcttcttccagttatgcagcacctggctaagaatgtagtcatggtaaatcaaggacttacaaagcacatgactgtcaagaacaagtatgccacatcgaagcatgctaagatcagcactctaccacagctgaattctgcactagttcaagatttagccaaggctgtggcaaaggtgtaacttgtaaacttgagttggagtactatactttacaaactaaaattggcacatgtgcatctgt

SEQ ID NO: 148 - DNA, 1658 bp, Homo sapiens
ctctctctctatctctctcagaatgacaattctaggtacaacttttggcatggttttttctttacttcaagtcgtttctggagaaagtggctatgctcaaaatggagacttggaagatgcagaactggatgactactcattctcatgctatagccagttggaagtgaatggatcgcagcattcactgacctgtgcttttgaggacccagatgtcaacaccaccaatctggaatttgaaatatgtggggccctcgtggaggtaaagtgcctgaatttcaggaaactacaagagatatatttcatcgagacaaagaaattcttactgattggaaagagcaatatatgtgtgaaggttggagaaaagagtctaacctgcaaaaaaatagacctaaccactatagttaaacctgaggctccttttgacctgagtgtcatctatcgggaaggagccaatgactttgtggtgacatttaatacatcacacttgcaaaagaagtatgtaaaagttttaatgcatgatgtagcttaccgccaggaaaaggatgaaaacaaatggacgcatgtgaatttatccagcacaaagctgacactcctgcagagaaagctccaaccggcagcaatgtatgagattaaagttcgatccatccctgatcactattttaaaggcttctggagtgaatggagtccaagttattacttcagaactccagagatcaataatagctcaggggagatggatcctatcttactaaccatcagcattttgagttttttctctgtcgctctgttggtcatcttggcctgtgtgttatggaaaaaaaggattaagcctatcgtatggcccagtctccccgatcataagaagactctggaacatctttgtaagaaaccaagaaaaaatttaaatgtgagtttcaatcctgaaagtttcctggactgccagattcatagggtggatgacattcaagctagagatgaagtggaaggttttctgcaagatacgtttcctcagcaactagaagaatctgagaagcagaggcttggaggggatgtgcagagccccaactgcccatctgaggatgtagtcgtcactccagaaagctttggaagagattcatccctcacatgcctggctgggaatgtcagtgcatgtgacgcccctattctctcctcttccaggtccctagactgcagggagagtggcaagaatgggcctcatgtgtaccaggacctcctgcttagccttgggactacaaacagcacgctgccccctccattttctctccaatctggaatcctgacattgaacccagttgctcagggtcagcccattcttacttccctgggatcaaatcaagaagaagcatatgtcaccatgtccagcttctaccaaaaccagtgaagtgtaagaaacccagactgaacttaccgtgagcgacaaagatgatttaaaagggaagtctagagttcctagtctccctcacagcacagagaagacaaaattagcaaaaccccactacacagtctgcaagattctgaaacattgctttgaccactcttcctgagttcagtggcactcaacatgagtcaagagcatcctgcttctaccatgtggatttggtcacaaggtttaaggtgacccaatgattcagctattt

SEQ ID NO: 149 - DNA, 2206 bp, Homo sapiens
ctagtctttcagccttcaggctgtttttggcttgaagctctcttggcctcctagtttctacctaatcatgtccctggtggaggccatcagcctctggaatgaaggggtgctggcagcggacaagaaggactggaagggagccctggatgccttcagtgccgtccaggacccccactcccggatttgcttcaacattggctgcatgtacactatcctgaagaacatgactgaagcagagaaggcctttaccagaagcattaaccgagacaagcacttggcagtggcttacttccaacgagggatgctctactaccagacagagaaatatgatttggctatcaaagaccttaaagaagccttgattcagcttcgagggaaccagctgatagactataagatcctggggctccagttcaagctgtttgcctgtgaggtgttatataacattgctttcatgtatgccaagaaggaggaatggaaaaaagctgaagaacagttagcattggccacgagcatgaagtctgagcccagacattccaaaatcgacaaggcgatggagtgtgtctggaagcagaagctatatgagccagtggtgatccctgtgggcaagctgtttcgaccaaatgagagacaagtggctcagctggccaagaaggattacctaggcaaggcgacggtcgtggcatctgtggtggatcaagacagtttctctgggtttgcccctctgcaaccacaggcagctgagcctccacccagaccgaaaaccccagagatcttcagggctctggaaggggaggctcaccgtgtgctatttgggtttgtgcctgagacaaaagaagagctccaggtcatgccagggaacattgtctttgtcttgaagaagggcaatgataactgggccacggtcatgttcaacgggcagaaggggcttgttccctgcaactaccttgaaccagttgagttgcggatccaccctcagcagcagccccaggaggaaagctctccgcagtccgacatcccagctcctcctagttccaaagcccctggaaaaccccagctgtcaccaggccagaaacaaaaagaagagcctaaggaagtgaagctcagtgttcccatgccctacacactcaaggtgcactacaagtacacggtagtcatgaagactcagcccgggctcccctacagccaggtccgggacatggtgtctaagaaactggagctccggctggaacacactaagctgagctatcggcctcgggacagcaatgagctggtgcccctttcagaagacagcatgaaggatgcctggggccaggtgaaaaactactgcctgactctgtggtgtgagaacacagtgggtgaccaaggctttccagatgaacccaaggaaagtgaaaaagctgatgctaataaccagacaacagaacctcagcttaagaaaggcagccaagtggaggcactcttcagttatgaggctacccaaccagaggacctggagtttcaggaaggggatataatcctggtgttatcaaaggtgaatgaagaatggctggaaggggagtgcaaagggaaggtgggcattttccccaaagtttttgttgaagactgcgcaactacagatttggaaagcactcggagagaagtctaggatgtttcacaaactacaaagctgaagaaaatgaagccctattacttgtttgtaagatttagcacccttctgctgtatactgtactgagacattacagtttggaagtgttaactatttattccctgttaaaatttaacctactagacaatgatgtgagtacccaggatgatttcctggggcacagtgggtgaggagatggggacaggtgaatggaggagttaggggagaggaaaagtggatggaagtgtctggaaagggcacgagagagtcttccaggtactgatcctgtttcttgctctgagtgctagctagccagctgtgttcacactgtaaacattcatcaagctgtacatttggtgcacttttctgtgtcataccacaataaaaaaaaacctatcatcatcttacaaaaacaagacacccaagtccaggcccaaggagtaagtacaaatattcctgtttctgaaccattactgtaattggctcttaaggcttgaagtaaccttataggttactcataaggcatatacaaataaacttgtttgttttcttttttc

SEQ ID NO: 150 - DNA, 2798 bp, Homo sapiens
gccctctcccacagcggagtccaaaacaggcctaccagtcagttcttatttctattgggtgtttccatgctccaccatgttaagagctaagaatcagctttttttactttcacctcattacctgaggcaggtaaaagaatcatcaggctccaggctcatacagcaacgacttctacaccagcaacagccccttcacccagaatgggctgccctggctaaaaagcagctgaaaggcaaaaacccagaagacctaatatggcacaccccggaagggatctctataaaacccttgtattccaagagagatactatggacttacctgaagaacttccaggagtgaagccattcacacgtggaccatatcctaccatgtatacctttaggccctggaccatccgccagtatgctggttttagtactgtggaagaaagcaataagttctataaggacaacattaaggctggtcagcagggattatcagttgcctttgatctggcgacacatcgtggctatgattcagacaaccctcgagttcgtggtgatgttggaatggctggagttgctattgacactgtggaagataccaaaattctttttgatggaattcctttagaaaaaatgtcagtttccatgactatgaatggagcagttattccagttcttgcaaattttatagtaactggagaagaacaaggtgtacctaaagagaaacttactggtaccatccaaaatgatatactaaaggaatttatggttcgaaatacatacatttttcctccagaaccatccatgaaaattattgctgacatatttgaatatacagcaaagcacatgccaaaatttaattcaatttcaattagtggataccatatgcaggaagcaggggctgatgccattctggagctggcctatactttagcagatggattggagtactctagaactggactccaggctggcctgacaattgatgaatttgcaccaaggttgtctttcttctggggaattggaatgaatttctatatggaaatagcaaagatgagagctggtagaagactctgggctcacttaatagagaaaatgtttcagcctaaaaactcaaaatctcttcttctaagagcacactgtcagacatctggatggtcacttactgagcaggatccctacaataatattgtccgtactgcaatagaagcaatggcagcagtatttggagggactcagtctttgcacacaaattcttttgatgaagctttgggtttgccaactgtgaaaagtgctcgaattgccaggaacacacaaatcatcattcaagaagaatctgggattcccaaagtggctgatccttggggaggttcttacatgatggaatgtctcacaaatgatgtttatgatgctgctttaaagctcattaatgaaattgaagaaatgggtggaatggccaaagctgtagctgagggaatacctaaacttcgaattgaagaatgtgctgcccgaagacaagctagaatagattctggttctgaagtaattgttggagtaaataagtaccagttggaaaaagaagacgctgtagaagttctggcaattgataatacttcagtgcgaaacaggcagattgaaaaacttaagaagatcaaatccagcagggatcaagctttggctgaacattgtcttgctgcactaaccgaatgtgctgctagcggagatggaaatatcctggctcttgcagtggatgcatctcgggcaagatgtacagtgggagaaatcacagatgccctgaaaaaggtatttggtgaacataaagcgaatgatcgaatggtgagtggagcatatcgccaggaatttggagaaagtaaagagataacatctgctatcaagagggttcataaattcatggaacgtgaaggtcgcagacctcgtcttcttgtagcaaaaatgggacaagatggccatgacagaggagcaaaagttattgctacaggatttgctgatcttggttttgatgtggacataggccctcttttccagactcctcgtgaagtggcccagcaggctgtggatgcggatgtgcatgctgtgggcgtaagcaccctcgctgctggtcataaaaccctagttcctgaactcatcaaagaacttaactcccttggacggccagatattcttgtcatgtgtggaggggtgataccacctcaggattatgaatttctgtttgaagttggtgtttccaatgtatttggtcctgggactcgaattccaaaggctgccgttcaggtgcttgatgatattgagaagtgtttggaaaagaagcagcaatctgtataatatcctctttttgttttagcttttgtctaaaatattattttagttatgatcaaagaagagagtaaagctatgtcttcaatttaatttcaatacctgatttgtactttccttgaaagctttactttaaaataccttacttataggcctggtgtcatgctataagtatgtacatacagtttcacttcaaaaataaaaaaaaatccctaaaaactctctatactctctataacaatactttatcaagaactctggacaatggtattatttttaaaaatcatggtgatgtatttattagaatgtttcttataaatctctttcatttttatattaagaattaaactgtacctaaaaaaactctgactattcccatttctcagtttagcattacattgtcttgagcaccagaaaataaaatccatatattaattaaaacctatcttgaaaaaaaaaaaaaaaaaaaaaaaaaaaa

SEQ ID NO: 151 - DNA, 3984 bp, Homo sapiens
gtcctttcacgcgtgtcttcgtgttggtgcgcttttcactggtcataaagtgctgctcacggccgtgaactgctacagcgtgaaggccgccacccgggtccaggatgcttttgccgccgccaagctcctggccctggccctgatcatcctgctgggcttcgtccagatcgggaagggtgatgtgtccaatctagatcccaagttctcatttgaaggcaccaaactggatgtggggaacattgtgctggcattatacagcggcctctttgcctatggaggatggaattacttgaatttcgtcacagaggaaatgatcaacccctacagaaacctgcccctggccatcatcatctccctgcccatcgtgacgctggtgtacgtgctgaccaacctggcctacttcaccaccctgtccaccgagcagatgctgtcgtccgaggccgtggccgtggacttcgggaactatcacctgggcgtcatgtcctggatcatccccgtcttcgtgggcctgtcctgctttggctccgtcaatgggtccctgttcacatcctccaggctcttcttcgtggggtcccgggaaggccacctgccctccatcctctccatgatccacccacagctcctcacccccgtgccgtccctcgtgttcacgtgtgtgatgacgctgctctacgccttctccaaggacatcttctccgtcatcaacttcttcagcttcttcaactggctctgcgtggccctggccatcatcggcatgatctggctgcgccacagaaagcctgagcttgagcggcccatcaaggtgaacctggccctgcctgtgttcttcatcctggcctgcctcttcctgatcgccgtctccttctggaagacacccgtggagtgtggcatcggcttcaccatcatcctcagcgggctgcccgtctacttcttcggggtctggtggaaaaacaagcccaagtggctcctccagggcatcttctccacgaccgtcctgtgtcagaagctcatgcaggtggtcccccaggagacatagccaggaggccgagtggctgccggaggagcatgcgcagaggccagttaaagtagatcacctcctcgaacccactccggttccccgcaacccacagctcagctgcccatcccagtcctcgccgtccctcccaggtcgggcagtggaggctgctgtgaaaactctggtacgaatctcatccctcaactgagggccagggacccaggtgtgcctgtgctcctgcccaggagcagcttttggtctccttgggccctttttcccttccctcctttgtttacttatatatatattttttttaaacttaaattttgggtcaacttgacaccactaagatgattttttaaggagctgggggaaggcaggagccttcctttctcctgccccaagggcccagaccctgggcaaacagagctactgagacttggaacctcattgctaccacagacttgcactgaagccagacagctgcccagacacatgggcttgtgacattcgtgaaaaccaaccctgtgggcttatgtctctgccttagggtttgcagagtggaaactcagccgtagggtggcactgggagggggtgggggatctgggcaaggtgggtgattcctcccaggaggtgcttgaggccccgatggactcctgaccataatcctagccccgagacaccatcctgagccagggaacagccccagggttggggggtgccggcatctcccctagctcaccaggcctggcctctgggcagtgtggcctcttggctatttctgttccagttttggaggctgagttctggttcatgcagacaaagccctgtccttcagtcttctagaaacagagacaagaaaggcagacacaccgcggccaggcacccatgtgggcgcccaccctgggctccacacagcagtgtcccctgccccagaggtcgcagctaccctcagcctccaatgcattggcctctgtaccgcccggcagccccttctggccggtgctgggttcccactcccggcctaggcacctccccgctctccctgtcacgctcatgtcctgtcctggtcctgatgcccgttgtctaggagacagagccaagcactgctcacgtctctgccgcctgcgtttggaggcccctgggctctcacccagtccccacccgcctgcagagagggaactagggcaccccttgtttctgttgttcccgtgaatttttttcgctatgggaggcagccgaggcctggccaatgcggcccactttcctgagctgtcgctgcctccatggcagcagccaaggacccccagaacaagaagacccccccgcaggatccctcctgagctcggggggctctgccttctcaggccccgggcttcccttctccccagccagaggtggagccaagtggtccagcgtcactccagtgctcagctgtggctggaggagctggcctgtggcacagccctgagtgtcccaagccgggagccaacgaagccggacacggcttcactgaccagcggctgctcaagccgcaagctctcagcaagtgcccagtggagcctgccgcccccacctgggcaccgggaccccctcaccatccagtgggcccggagaaacctgatgaacagtttggggactcaggaccagatgtccgtctctcttgcttgaggaatgaagacctttattcacccctgccccgttgcttcccgctgcacatggacagacttcacagcgtctgctcataggacctgcatccttcctggggacgaattccactcgtccaagggacagcccacggtctggaggccgaggaccaccagcaggcaggtggactgactgtgttgggcaagacctcttccctctgggcctgttctcttggctgcaaataaggacagcagctggtgccccacctgcctggtgcattgctgtgtgaatccaggaggcagtggacatcgtaggcagccacggccccaggtccaggagaagtgctccctggaggcacggaccactgcttcccactggggccggcggggcccacgcacgacgtcagcctcttaccttcccgcctcggctaggggtcctcgggatgccgttctgttccaacctcctgttctgggaggtggacatgcctcaaggatacagggagccggcggcctctcgacggcacgcacttcctgttggctgctgcggctgtgggcgagcatgggggctgccagcgtctgttgtggaaagtagctgctagtgaaatggctggggccgctggggtccgtcttcacactgcgcaggtctcttctgggcgtctgagctggggtgggagctcctccgcagaaggttggtggggggtccagtctgtgatccttggtgctgtgtgccccactccagcctggggaccccacttcagaaggtaggggccgtgtcccgcggtgctgactgaggcctgcttccccctccccctcctgctgtgctggaattccacagggaccagggccaccgcaggggactgtctcagaagacttgatttttccgtccctttttctccacactccactgacaaacgtccccagcggtttccacttgtgggcttcaggtgttttcaagcacaacccaccacaacaagcaagtgcattttcagtcgttgtgcttttttgttttgtgctaacgtcttactaatttaaagatgctgtcggcaccatgtttatttatttccagtggtcatgctcagccttgctgctctgcgtggcgcaggtgccatgcctgctccctgtctgtgtcccagccacgcagggccatccactgtgacgtcggccgaccaggctggacaccctctgccgagtaatgacgtgtgtggctgggaccttctttattctgtgttaatggctaacctgttacactgggctgggttgggtagggtgttctggcttttttgtggggtttttatttttaaagaaacactcaatcatcctag

SEQ ID NO: 152 - DNA, 1446 bp, Homo sapiens
ctgccatttaggacaagctggatgatgatggtttgatagctccaggggttcgtgtataggagatgatgaatctgcttcatccagaatcacaatcttaaaaggcgggaactgaggcgactgtggggacatcagtgatcgtaagtctcctgggcccgttattctcagattaggtgacggagctaagacttcgagaccatctcgtcctttttgtatcgcggaaacctgaggaacgagccggcggcggtgacctgcacgagaagccaggctaactgggtgaagtaccatgcaagcatttcttaaaggtacatccatcagtactaaacccccgctgaccaaggatcgaggagtagctgccagtgcgggaagtagcggagagaacaagaaagccaaacccgttccctgggtggaaaaatatcgcccaaaatgtgtggatgaagttgctttccaggaagaagtggttgcagtgctgaaaaaatctttagaaggagcagatcttcctaatctcttgttttacggaccacctggaactggaaaaacatccactattttggcagcagctagagaactctttgggcctgaacttttccgattaagagttcttgagttaaatgcatctgatgaacgtggaatacaagtagttcgagagaaagtgaaaaattttgctcaattaactgtgtcaggaagtcgctcagatgggaagccgtgtccgccttttaagattgtgattctggatgaagcagattctatgacctcagctgctcaggcagctttaagacgtaccatggagaaggagtcgaaaaccacccgattctgtcttatctgtaactatgtcagtcgaataattgaacccctgacctctagatgttcaaaattccgcttcaagcctctgtcagataaaattcaacagcagcgattactagacattgccaagaaggaaaatgtcaaaattagtgatgagggaatagcttatcttgttaaagtgtcagaaggagacttaagaaaagccattacatttcttcaaagcgctactcgattaacaggtggaaaggagatcacagagaaagtgattacagacattgctggggtaataccagctgagaaaattgatggagtatttgctgcctgtcagagtggctcttttgacaaactagaagctgtggtcaaggatttaatagatgagggtcatgcagcaactcagctcgtcaatcaactccatgatgtggttgtagaaaataacttatctgataaacagaagtctattatcacagaaaaacttgccgaagttgacaaatgcctagcagatggtgctgatgaacatttgcaactcatcagcctttgtgcaactgtgatgcagcagttatctcagaattgttaacgtgatatatctggatggggggttttgtaaataatgaagttgtaataaaaataaaatgaccaaaagcaccg

SEQ ID NO: 153 - DNA, 5102 bp, Homo sapiens
gcttctgcgactccagttgtgagagccgcaagggcatgggaattgacgccactcaccgacccccagtctcaatctcaacgctgtgaggaaacctcgactttgccaggtccccaagggcagcggggctcggcgagcgaggcacccttctccgtccccatcccaatccaagcgctcctggcactgacgacgccaagagactcgagtgggagttaaagcttccagtgagggcagcaggtgtccaggccgggcctgcgggttcctgttgacgtcttgccctaggcaaaggtcccagttccttctcggagccggctgtcccgcgccactggaaaccgcacctccccgcagcatgggcaccagcctcagcccgaacgacccttggccgctaaacccgctgtccatccagcagaccacgctcctgctactcctgtcggtgctggccactgtgcatgtgggccagcggctgctgaggcaacggaggcggcagctccggtccgcgcccccgggcccgtttgcgtggccactgatcggaaacgcggcggcggtgggccaggcggctcacctctcgttcgctcgcctggcgcggcgctacggcgacgttttccagatccgcctgggcagctgccccatagtggtgctgaatggcgagcgcgccatccaccaggccctggtgcagcagggctcggccttcgccgaccggccggccttcgcctccttccgtgtggtgtccggcggccgcagcatggctttcggccactactcggagcactggaaggtgcagcggcgcgcagcccacagcatgatgcgcaacttcttcacgcgccagccgcgcagccgccaagtcctcgagggccacgtgctgagcgaggcgcgcgagctggtggcgctgctggtgcgcggcagcgcggacggcgccttcctcgacccgaggccgctgaccgtcgtggccgtggccaacgtcatgagtgccgtgtgtttcggctgccgctacagccacgacgaccccgagttccgtgagctgctcagccacaacgaagagttcgggcgcacggtgggcgcgggcagcctggtggacgtgatgccctggctgcagtacttccccaacccggtgcgcaccgttttccgcgaattcgagcagctcaaccgcaacttcagcaacttcatcctggacaagttcttgaggcactgcgaaagccttcggcccggggccgccccccgcgacatgatggacgcctttatcctctctgcggaaaagaaggcggccggggactcgcacggtggtggcgcgcggctggatttggagaacgtaccggccactatcactgacatcttcggcgccagccaggacaccctgtccaccgcgctgcagtggctgctcctcctcttcaccaggtatcctgatgtgcagactcgagtgcaggcagaattggatcaggtcgtggggagggaccgtctgccttgtatgggtgaccagcccaacctgccctatgtcctggccttcctttatgaagccatgcgcttctccagctttgtgcctgtcactattcctcatgccaccactgccaacacctctgtcttgggctaccacattcccaaggacactgtggtttttgtcaaccagtggtctgtgaatcatgacccagtgaagtggcctaacccggagaactttgatccagctcgattcttggacaaggatggcctcatcaacaaggacctgaccagcagagtgatgattttttcagtgggcaaaaggcggtgcattggcgaagaactttctaagatgcagctttttctcttcatctccatcctggctcaccagtgcgatttcagggccaacccaaatgagcctgcgaaaatgaatttcagttatggtctaaccattaaacccaagtcatttaaagtcaatgtcactctcagagagtccatggagctccttgatagtgctgtccaaaatttacaagccaaggaaacttgccaataagaagcaagaggcaagctgaaattttagaaatattcacatcttcggagatgaggagtaaaattcagtttttttccagttcctcttttgtgctgcttctcaattagcgtttaaggtgagcataaatcaactgtccatcaggtgaggtgtgctccatacccagcggttcttcatgagtagtgggctatgcaggagcttctgggagatttttttgagtcaaagacttaaagggcccaatgaattattatatacatactgcatcttggttatttctgaaggtagcattctttggagttaaaatgcacatatagacacatacacccaaacacttacaccaaactactgaatgaagaagtattttggtaaccaggccatttttggtgggaatccaagattggtctcccatatgcagaaatagacaaaaagtatattaaacaaagtttcagagtatattgttgaagagacagagacaagtaatttcagtgtaaagtgtgtgattgaaggtgataagggaaaagataaagaccagaaattcccttttcaccttttcaggaaaataacttagactctagtatttatgggtggatttatccttttgccttctggtatacttccttacttttaaggataaatcataaagtcagttgctcaaaaagaaatcaatagttgaattagtgagtatagtggggttccatgagttatcatgaattttaaagtatgcattattaaattgtaaaactccaaggtgatgttgtacctcttttgcttgccaaagtacagaatttgaattatcagcaaagaaaaaaaaaaaagccagccaagctttaaattatgtgaccataatgtactgatttcagtaagtctcataggttaaaaaaaaaagtcaccaaatagtgtgaaatatattacttaactgtccgtaagcagtatattagtattatcttgttcaggaaaaggttgaataatatatgccttgtgtaatattgaaaattgaaaagtacaactaacgcaaccaagtgtgctaaaaatgagcttgattaaatcaaccacctatttttgacatggaaatgaagcagggtttcttttcttcactcaaattttggcgaatctcaaaattagatcctaagatgtgttcttatttttataacatctttattgaaattctatttataatacagaatcttgttttgaaaataacctaattaatatattaaaattccaaattcatggcatgcttaaattttaactaaattttaaagccattctgattattgagttccagttgaagttagtggaaatctgaacattctcctgtggaaggcagagaaatctaagctgtgtctgcccaatgaataatggaaaatgccatgaattacctggatgttctttttacgaggtgacaagagttggggacagaactcccattacaactgaccaagtttctcttctagatgattttttgaaagttaacattaatgcctgctttttggaaagtcagaatcagaagatagtcttggaagctgtttggaaaagacagtggagatgaggtcagttgtgttttttaagatggcaattactttggtagctgggaaagcataaagctcaaatgaaatgtatgcattcacatttagaaaagtgaattgaagtttcaagttttaaagttcattgcaattaaacttccaaagaaagttctacagtgtcctaagtgctaagtgcttattacattttattaagctttttggaatctttgtaccaaaattttaaaaaagggagtttttgatagttgtgtgtatgtgtgtgtggggtggggggatggtaagagaaaagagagaaacactgaaaagaaggaaagatggttaaacattttcccactcattctgaattaattaatttggagcacaaaattcaaagcatggacatttagaagaaagatgtttggcgtagcagagttaaatctcaaataggctattaaaaaagtctacaacatagcagatctgttttgtggtttggaatattaaaaaacttcatgtaattttattttaaaatttcatagctgtacttcttgaatataaaaaatcatgccagtatttttaaaggcattagagtcaactacacaaagcaggcttgcccagtacatttaaattttttggcacttgccattccaaaatattatgccccaccaaggctgagacagtgaatttgggctgctgtagcctatttttttagattgagaaatgtgtagctgcaaaaataatcatgaaccaatctggatgcctcattatgtcaaccaggtccagatgtgctataatctgtttttacgtatgtaggcccagtcgtcatcagatgcttgcggcaaaagaaagctgtgtttatatggaagaaagtaaggtgcttggagtttacctggcttatttaatatgcttataacctagttaaagaaaggaaaagaaaacaaaaaacgaatgaaaataactgaatttggaggctggagtaatcagattactgctttaatcagaaaccctcattgtgtttctaccggagagagaatgtatttgctgacaaccattaaagtcagaagttttactccaggttattgcaataaagtataatgtttattaaatgcttcatttgtatgtcaaagctttgactctataagcaaattgcttttttccaaaacaaaaagatgtctcaggtttgttttgtgaattttctaaaagctttcatgtcccagaacttagcctttacctgtgaagtgttactacagccttaatattttcctagtagatctatattagatcaaatagttgcatagcagtatatgttaatttgtgtgtttttagctgtgacacaactgtgtgattaaaaggtatactttagtagacatttataactcaaggataccttcttatttaatcttttcttatttttgtactttatcatgaatgcttttagtgtgtgcataatagctacagtgcatagttgtagacaaagtacattctggggaaacaacatttatatgtagcctttactgtttgatataccaaattaaaaaaaaattgtatctcattacttatactgggacaccattaccaaaataataaaaatcactttcataatcttgaaaaaa

SEQ ID NO: 154 - DNA, 3260 bp, Homo sapiens
atccagaaagcaccatagcaaccagtgatgtcatgtctgaaagcatggtggagacccatgatcccatacttgggagtggaaaaggggattctggggctgccccagacgtggatgataaattatgtctaagaatgaaactggttagtcctgagactgaggcgagtgaagagtctttgcagttcaacctggaaaagcctgcaactggtgaaagaaaaaatggatctactgctgttgctgagtctgttgccagtccccagaagaccatgtctgtgttgagctgtatctgtgaagccaggcaagagaatgaggctcgaagtgaggatccccccaccacacccatcagggggaacttgctccactttccaagttctcaaggagaagaggagaaagaaaaattggagggtgaccatacaatcaggcagagtcaacagcctatgaagcccattagtcctgtcaaggaccctgtttctcctgcttcccagaagatggtcatacaagggccatccagtcctcaaggagaggcaatggtgacagatgtgctagaagaccagaaagaaggacggagtactaataaggaaaatcctagtaaggccttgattgaaaggcccagccaaaataacataggaatccaaaccatggagtgttccttgagggtcccagaaactgtttcagcagcaacccagactataaagaatgtgtgtgagcaggggaccagtacagtggaccagaactttggaaagcaagatgccacagttcagactgagagggggagtggtgagaaaccagtcagtgctcctggggatgatacagagtcgctccatagccagggagaagaagagtttgatatgcctcagcctccacatggccatgtcttacatcgtcacatgagaacaatccgggaagtacgcacacttgtcactcgtgtcattacagatgtgtattatgtggatggaacagaagtagaaagaaaagtaactgaggagactgaagagccaattgtagagtgtcaggagtgtgaaactgaagtttccccttcacagactgggggctcctcaggtgacctgggggatatcagctccttctcctccaaggcatccagcttacaccgcacatcaagtgggacaagtctctcagctatgcacagcagtggaagctcagggaaaggagccggaccactcagagggaaaaccagcgggacagaacccgcagattttgccttacccagctcccgaggaggcccaggaaaactgagtcctagaaaaggggtcagtcagacagggacgccagtgtgtgaggaggatggtgatgcaggccttggcatcagacagggagggaaggctccagtcacgcctcgtgggcgtgggcgaaggggccgcccaccttctcggaccactggaaccagagaaacagctgtgcctggccccttgggcatagaggacatttcacctaacttgtcaccagatgataaatccttcagccgtgtcgtgccccgagtgccagactccaccagacgaacagatgtgggtgctggtgctttgcgtcgtagtgactctccagaaattcctttccaggctgctgctggcccttctgatggcttagatgcctcctctccaggaaatagctttgtagggctccgtgttgtagccaagtggtcatccaatggctacttttactctgggaaaatcacacgagatgtcggagctgggaagtataaattgctctttgatgatgggtacgaatgtgatgtgttgggcaaagacattctgttatgtgaccccatcccgctggacactgaagtgacggccctctcggaggatgagtatttcagtgcaggagtggtgaaaggacataggaaggagtctggggaactgtactacagcattgaaaaagaaggccaaagaaagtggtataagcgaatggctgtcatcctgtccttggagcaaggaaacagactgagagagcagtatgggcttggcccctatgaagcagtaacacctcttacaaaggcagcagatatcagcttagacaatttggtggaagggaagcggaaacggcgcagtaacgtcagctccccagccacccctactgcctccagtagcagcagcacaacccctacccgaaagatcacagaaagtcctcgtgcctccatgggagttctctcaggcaaaagaaaacttatcacttctgaagaggaacggtcccctgccaagcgaggtcgcaagtctgccacagtaaaacctggtgcagtaggggcaggagagtttgtgagcccctgtgagagtggagacaacaccggtgaaccctctgccctggaagagcagagagggcctttgcctctcaacaagaccttgtttctgggctacgcatttctccttaccatggccacaaccagtgacaagttggccagccgctccaaactgccagatggtcctacaggaagcagtgaagaagaggaggaatttttggaaattcctcctttcaacaagcagtatacagaatcccagcttcgagcaggagctggctatatccttgaagatttcaatgaagcccagtgtaacacagcttaccagtgtcttctaattgcggatcagcattgtcgaacccggaagtacttcctgtgccttgccagtgggattccttgtgtgtctcatgtctgggtccatgatagttgccatgccaaccagctccagaactaccgtaattatctgttgccagctgggtacagccttgaggagcaaagaattctggactggcaaccccgtgaaaatcctttccagaatctgaaggtactcttggtatcagaccaacagcagaacttcctggagctctggtctgagatcctcatgactggtggtgcagcctctgtgaagcagcaccattcaagtgcccataacaaagatattgctttaggggtatttgatgtggtggtgacggacccctcatgcccagcctcggtgctgaagtgtgctgaagcattgcagctgcctgtggtgtcacaagagtgggtgatccagtgcctcattgttggggagagaattggattcaagcagcatccaaaatataaacacgattatgtttctcactaaagatacttggtcttactggttttattccctgctatcgtggagattgtgttttaaccaggttttaaatgtgtcttgtgtgtaactggattccttgcatggatcttgtatatagttttatttgctgaacttttatgataaaataaatgttgaatctctttggttgtagtaactggg

SEQ ID NO: 155 - DNA, 1873 bp, Homo sapiens
caaactacgtgctgtacagctgcatcagctgctcgtagacatgtccagcagctggtcgaggtccacgccgcggtaggtgaagttgcggaaggtccggcgagggatctgaaacttgccccttacccttcgggatattgcaggacgctgcatcatgagcgacagtaaatgtgacagtcagttttatagtgtccaagtggcagactcaaccttcactgtcctaaaacgttaccagcagctgaaaccaattggctctggggcccaagggattgtttgtgctgcatttgatacagttcttgggataaatgttgcagtcaagaaactaagccgtccttttcagaaccaaactcatgcaaagagagcttatcgtgaacttgtcctcttaaaatgtgtcaatcataaaaatataattagtttgttaaatgtgtttacaccacaaaaaactctagaagaatttcaagatgtgtatttggttatggaattaatggatgctaacttatgtcaggttattcacatggagctggatcatgaaagaatgtcctaccttctttaccagatgctttgtggtattaaacatctgcattcagctggtataattcatagagatttgaagcctagcaacattgttgtgaaatcagactgcaccctgaagatccttgactttggcctggcccggacagcgtgcactaacttcatgatgaccccttacgtggtgacacggtactaccgggcgcccgaagtcatcctgggtatgggctacaaagagaacgttgatatctggtcagtgggttgcatcatgggagagctggtgaaaggttgtgtgatattccaaggcactgaccatattgatcagtggaataaagttattgagcagctgggaacaccatcagcagagttcatgaagaaacttcagccaactgtgaggaattatgtcgaaaacagaccaaagtatcctggaatcaaatttgaagaactctttccagattggatattcccatcagaatctgagcgagacaaaataaaaacaagtcaagccagagatctgttatcaaaaatgttagtgattgatcctgacaagcggatctctgtagacgaagctctgcgtcacccatacatcactgtttggtatgaccccgccgaagcagaagccccaccacctcaaatttatgatgcccagttggaagaaagagaacatgcaattgaagaatggaaagagctaatttacaaagaagtcatggattgggaagaaagaagcaagaatggtgttgtaaaagatcagcctccagatgcagcagtaagtagcaacgccactccttctcagtcttcatcgatcaatgacatttcatccatgtccactgagcagacgctggcctcagacacagacagcagtcttgatgcctcgacgggaccccttgaaggctgtcgatgataggttagaaatagcaaacctgtcagcattgaaggaactctcacctccgtgggcctgaaatgcttgggagttgatggaaccaaatagaaaaactccatgttctgcatgtaagaaacacaatgccttgccctactcagacctgataggattgcctgcttagatgataaaatgaggcagaatatgtctgaagaaaaaaattgcaagccacacttctagagattttgttcaagatcatttcagttgagcagttagagtaggtgaatttgtcaaattgtactagtgacagtttctcatcatctgtaactgttgagatgattgtgcatgtgaccacaaatgcttgcttggacttgcccatctagcactttggaaatcagtatttaaatgccaaataatcttccaggtagtgctgcttctgaagttatctcttaatcctcttaagtaatttgg

SEQ ID NO: 156 - DNA, 3143 bp, Homo sapiens
ggggaagtgtgggagcaggtgggctgggcagtggcagaaacctgatgacacaatctcgccgcctccctgtgttggtggaggatgtctgcagcagcatttaaattctgggagggcttggttgtcagcagcagcaggaggaggcagagacagcatcgtcgggaccagactcgtctcaggccagttgcagccttctcagccaaacgccgaccaaggtacagcttcagtttgctactgggttgtgcattcagctgaatttcatggggaagtccaaattctaaggaaaaaaatgtggtagtataaaaaggtatcactgttgtaacctatgaagatgtcagctattcctttgaaatattttgcaggaaaactcactaccatgagaattgcagtgatttgcttttgcctcctaggcatcacctgtgccataccagtgagtacagttgcatcttaaagaaaattcctgaaaataactgaattgtgtgcttccatgtgctaggaggacattcttgtaatctttcttcatcttttctgtttctaaggttaaacaggctgattctggaagttctgaggaaaagcaggtaagcatcttttatgtttttatatagttaaatcatttactcaattatggcgagaggtgcaagaaacgtatttgctgcgatcaaatgagttcatatttgtaaagcaatttgaaagagtgcctagcccacagtaagtgctacataagagtttgttaaatgaatctgcaaaaaaaaaaaaaattacaaaaaggtacctaagggtccgggtgactatatgcttccatcaagactagtgaagaatggttgttttttccattcatccctacatttctttttttaataatgataaacatgcaacttttttgtagctttacaacaaatacccagatgctgtggccacatggctaaaccctgacccatctcagaagcagaatctcctagccccacaggtatttttaaacttctcataattaaactacagtgatgaaagatagccacactcaggccatttgggctgctcagatgaatcctgccctgcctgctggcaaacatgtgcttaggacattgactgatctgccatgttggcttctctctgtgttaagccatccacagatgaggctgaaaaataaaaactgctttggattaaaaaggttaacttttgaataaaaaagctaggcatgtgtgatgcgcactaacacgtgccattccttcttcagaatgctgtgtcctctgaagaaaccaatgactttaaacaagaggtaagttctcattttcaatcagaggcccatcatgccttgaagagatgaaagaaggcattgcctggattctcttctgatgaaatttcattagcaagttttccagctaattggcagtctaaaacttgctcataaataaaacatgtatttactaaatatcagaaatactaggtttcctcggataacctaaaagccatggtatgtactgtgaatgcaaagattctgaaactaaataaaaagaaagatagtaaaagactaatgtgctataaaggctaagggaaaataaaaacccatatattaattttcccggccatcttaattttcagacccttccaagtaagtccaacgaaagccatgaccacatggatgatatggatgatgaagatgatgatgaccatgtggacagccaggactccattgactcgaacgactctgatgatgtagatgacactgatgattctcaccagtctgatgagtctcaccattctgatgaatctgatgaactggtcactgattttcccacggacctgccagcaaccgaagttttcactccagttgtccccacagtagacacatatgatggccgaggtgatagtgtggtttatggactgaggtcaaaatctaagaagtttcgcagacctgacatccaggtaaatcctttaacagacacacctgatggttctgactagcgctcaagtctaggaaaccacagtttgcatattcattcattcattcatccattcattcatccattcagcaagaattcattcatattctactttatgaccattgaatacaaatctttttctgcttggcggtttttgtaagtctacataatttctctctagatttgattctcaaacacaattctactttttgaaatcctggatcaaagtaacatgctagtattatttcagccagatttagacaatttttagtataagatgacctaaaagctagagagtggaaaaggattaccatattcccatccctagccgttcatataattattcttcatttgtgccgtgattcagtaccctgatgctacagacgaggacatcacctcacacatggaaagcgaggagttgaatggtgcatacaaggccatccccgttgcccaggacctgaacgcgccttctgattgggacagccgtgggaaggacagttatgaaacgagtcagctggatgaccagagtgctgaaacccacagccacaagcagtccagattatataagcggaaagccaatgatgagagcaatgagcattccgatgtgattgatagtcaggaactttccaaagtcagccgtgaattccacagccatgaatttcacagccatgaagatatgctggttgtagaccccaaaagtaaggaagaagataaacacctgaaatttcgtatttctcatgaattagatagtgcatcttctgaggtcaattaaaaggagaaaaaatacaatttctcactttgcatttagtcaaaagaaaaaatgctttatagcaaaatgaaagagaacatgaaatgcttctttctcagtttattggttgaatgtgtatctatttgagtctggaaataactaatgtgtttgataattagtttagtttgtggcttcatggaaactccctgtaaacaaaagcttcagggttatgtctatgttcattctatagaagaaatgcaaactatcactgtattttaatatttgttattctctcatgaatagaaatttatgtagaagcaaacaaaatacttttacccacttaaaaagagaatataacattttatgtcactataatcttttgttttttaagttagtgtatattttgttgtgattatcttttgtggtgtgaataaatcttttatcttgaatgtaataag

SEQ ID NO: 157 - DNA, 1584 bp, Homo sapiens
cgggatgcggcgcgccgcgcgttgaacctccttggcctgggcgaagctgtgtggaccaagcaagtcaggagtgtggccatgttttctgagcaggctgcccagagggcccacactctactgtccccaccatcagccaacaatgccacctttgcccgggtgccagtggcaacctacaccaactcctcacaacccttccggctaggagagcgcagctttagccggcagtatgcccacatttatgccacccgcctcatccaaatgagacccttcctggagaaccgggcccagcagcactggggcagtggagtgggagtgaagaagctgtgtgaactgcagcctgaggagaagtgctgtgtggtgggcactctgttcaaggccatgccgctgcagccctccatcctgcgggaggtcagcgaggagcacaacctgctcccccagcctcctcggagtaaatacatacacccagatgacgagctggtcttggaagatgaactgcagcgtatcaaactaaaaggcaccattgacgtgtcaaagctggttacggggactgtcctggctgtgtttggctccgtgagagacgacgggaagtttctggtggaggactattgctttgctgaccttgctccccagaagcccgcacccccacttgacacagataggtttgtgctactggtgtccggcctgggcctgggtggcggtggaggcgagagcctgctgggcacccagctgctggtggatgtggtgacggggcagcttggggacgaaggggagcagtgcagcgccgcccacgtctcccgggttatcctcgctggcaacctcctcagccacagcacccagagcagggattctatcaataaggccaaatacctcaccaagaaaacccaggcagccagcgtggaggctgttaagatgctggatgagatcctcctgcagctgagcgcctcagtgcccgtggacgtgatgccaggcgagtttgatcccaccaattacacgctcccccagcagcccctccacccctgcatgttcccgctggccactgcctactccacgctccagctggtcaccaacccctaccaggccaccattgatggagtcagatttttggggacatcaggacagaacgtgagtgacattttccgatacagcagcatggaggatcacttggagatcctggagtggaccctgcgggtccgtcacatcagccccacagccccggacactctaggttgttaccccttctacaaaactgacccgttcatcttcccagagtgcccgcatgtctacttttgtggcaacacccccagctttggctccaaaatcatccgaggtcctgaggaccagacagtgctgttggtgactgtccctgacttcagtgccacgcagaccgcctgccttgtgaacctgcgcagcctggcctgccagcccatcagcttctcgggcttcggggcagaggacgatgacctgggaggcctggggctgggcccctgactcaaaaaagtggttttgaccagagaggcccagatggaggctgttcattccctgcagtgtcggcattgtaaataaagcctggcacttgctgatgcg

SEQ ID NO: 158 - DNA, 3172 bp, Homo sapiens
gctgggtttagtaggagacctggggcaaggccccctgtggacgaccatctgccagcttctctcgttccgtcgattgggaggagcggtggcgacctcggccttcagtgtttccgacggagtgaatggcggcggcggctgggatgctgctgctgggcttgctgcaggcgggtgggtcggtgctgggccaggcgatggagaaggtgacaggcggcaacctcttgtccatgctgctgatcgcctgcgccttcaccctcagcctggtctacctgatccgtctggccgccggccacctggtccagctgcccgcaggggtgaaaagtcctccatacattttctccccaattccattccttgggcatgccatagcatttgggaaaagtccaattgaatttctagaaaatgcatatgagaagtatggacctgtatttagttttaccatggtaggcaagacatttacttaccttctggggagtgatgctgctgcactgctttttaatagtaaaaatgaagacctgaatgcagaagatgtctacagtcgcctgacaacacctgtgtttgggaagggagttgcatacgatgtgcctaatccagttttcttggagcagaagaaaatgttaaaaagtggccttaacatagcccactttaaacagcatgtttctataattgaaaaagaaacaaaggaatactttgagagttggggagaaagtggagaaaaaaatgtgtttgaagctctttctgagctcataattttaacagctagccattgtttgcatggaaaggaaatcagaagtcaactcaatgaaaaggtagcacagctgtatgcagatttggatggaggtttcagccatgcagcctggctcttaccaggttggctgcctttgcctagtttcagacgcagggacagagctcatcgggaaatcaaggatattttctataaggcaatccagaaacgcagacagtctcaagaaaaaattgatgacattctccaaactttactagatgctacatacaaggatgggcgtcctttgactgatgatgaagtagcagggatgcttattggattactcttggcagggcagcatacatcctcaactactagtgcttggatgggcttctttttggccagagacaaaacacttcaaaaaaaatgttatttagaacagaaaacagtctgtggagagaatctgcctcctttaacttatgaccagctcaaggatctaaatttacttgatcgctgtataaaagaaacattaagacttagacctcctataatgatcatgatgagaatggccagaactcctcagactgtggcagggtataccattcctccaggacatcaggtgtgtgtttctcccactgtcaatcaaagacttaaagactcatgggtagaacgcctggactttaatcctgatcgctacttacaggataacccagcatcaggggaaaagtttgcctatgtgccatttggagctgggcgtcatcgttgtattggggaaaattttgcctatgttcaaattaagacaatttggtccactatgcttcgtttatatgaatttgatctcattgatggatactttcccactgtgaattatacaactatgattcacacccctgagaacccagttatccgttacaaacgaagatcaaaatgaaaaaggttgcaaggaacgaatatatgtgattatcactgtaagccacaaaggcattcgaagagaatgaagtgtacaaaacaactcttgtagtttactgtttttttaagtgtgtaattctaaaagccagtttatgatttaggattttgttaactgaatggttctatcaaatataatagcatttgacacattttctaatagttatgatacttatacatgtgctttcaggaagttccttggtgaaacaattgttgaggggggatctaggtaattggcagattctaaataatataatttccagatagtaattttaagagtactcatcgctcttgccaaataagttcagggtattcaaatcttggactagtcctgcaaggtataaagaataaaaatcccagtgagatacttggaaaccacagtttattattatttatctgggcaattattgtgtgtgtgaggatggaagggtagggaataatcgaacatctaaagccttgaataagagaatactaattgttttggtatgatgatactcagaaatggagatattataggaaaaagaaatcctttggaattttaactaaaatcactgcatatgggaaattaagagatccaggaccatatttgataagagttcctaaaaataatgtaattattaatgctaaagactgctcatgtatcttgatctaattactaaataaattacatatttatttacctgataaatatgtatctagttctacaaggtcacatttatgtggaagtccaaagtcaagtccttaggggataattttgttttgggctcagttgttccctgcttccttttttttttttttttttttttgagatggagtctcgctctgttgcccaggctggagtgcagtggtgcgatctcagctcactgcatcctctgcctcccgggttcaagcaattctctgcctcagcctcccaagtagttgggattacaggcacctgccaccatgcctggctaattttttgtatttttagtagagacgggggtttcactatgttggctaggctggtcttgaactcctgagcctcgtgagtccacccgccttggcctcccaaagtgctgggattacaggcatgagccaccgcacctggccttccctgcttcctctctagaatccaattagggatgtttgttactactcatattgattaaaacagttaacaaacttttttctttttaaaatgtgagatcagtgaactctggttttaagataatctgaaacaaggtccttgggagtaataaaattggtcacattctgtaaagcacattctgtttaggaatcaacttatctcaaattgtaactcggggcctaactatatgagatggctgaaaaaataccacatcgtctgttttcactaggtgatgccaaaatattttgctttatgtatattacagttctttttaaaacactggaagactcatgttaaactctaattgtgaaggcagaatctctgctaatttttcagattaaaattctctttgaaaaaat

SEQ ID NO: 159 - DNA, 1146 bp, Homo sapiens
ggcacgagctcgtgccgattctgttttgaatatagccagaggaaaaaagcatggagaaaaaactaggagagtgtcttctcataaacaaccagccttgaaggctacaagtgacaaggaaaattctgttccgaatatggccacagaaacaaaggatgaacaaatatctgggacagtgtcttctcagaaacaaccagccttgaaggctacaagtgacaagaaagattctgtttcgaatatacccacagaaataaaggatggacaacaatctggaacagtgtcttctcagaaacaaccggcctggaaggctacaagtgtcaagaaagattctgtttcgaatatagccacagagataaaggatggacaaatacgtgggacagtgtcttctcagagacaaccagccttgaaggctacaggtgatgagaaagattctgtttcgaatatagccagagaaataaaggatggagaaaaatctgggacagtgtctcctcagaaacaatcggcccagaaggttatatttaaaaagaaagtttctcttttgaatattgccacaagaataacgggcggttggaaatctggaacagagtatcctgagaatctgcccaccttgaaggctacaattgaaaataaaaattctgttctgaatacagccaccaaaatgaaagatgtacaaacatccacaccagaacaagacttagaaatggcatcagagggagagcaaaagaggcttgaagaatatgaaaataaccagccacaggtgaaaaaccaaatacattctagggatgaccttgatgacataattcagtcatctcaaacagtctcagaggacggtgactcgctttgctgtaattgtaagaatgtcatattactcattgatcaacatgaaatgaagtgtaaagattgtgttcacctattgaaaattaaaaagacattttgtttatgtaaaagattaacagaacttaaagataatcactgtgagcaacttagagtaaaaattcgaaaactgaaaaataaggctagtgtactacaaaagagactatctgaaaaagaagaaataaaatcgcagttaaagcatgaaacacttgaattggaaaaagaactctgtagtttgagatttgccatacagcaagaaaaaaaaaaaaaaaaaaa

SEQ ID NO: 160 - DNA, 2200 bp, Homo sapiens
cgggattactgccaggcacagcacgacctctatgcagacaagtgaactgtagaaactgattactgctccaccaagaagcccccataagagtggttatcctggacacagaagtgttgaattgaaatccacagagcattttacaagagttctgacctggatggggtaaacctcagtgcacttcttttctgttggcctcagtattactggattgaagaattgctgcttcttgttaggaggttcatttcacttatcattacttacaacttcatactcaaagcactgagaatttcaagtggagtatattgaagtagacttcagtttctttgcatcatttctgtattcaatttttttaattatttcataaccctattgagtgtttttaactaaataacatggctcgaatgaaccgcccagctcctgtggaagtcacatacaagaacatgagatttcttattacacacaatccaaccaatgcgaccttaaacaaatttatagaggaacttaagaagtatggagttaccacaatagtaagagtatgtgaagcaacttatgacactactcttgtggagaaagaaggtatccatgttcttgattggccttttgatgatggtgcaccaccatccaaccagattgttgatgactggttaagtcttgtgaaaattaagtttcgtgaagaacctggttgttgtattgctgttcattgcgttgcaggccttgggagagctccagtacttgttgccctagcattaattgaaggtggaatgaaatacgaagatgcagtacaattcataagacaaaagcggcgtggagcttttaacagcaagcaacttctgtatttggagaagtatcgtcctaaaatgcggctgcgtttcaaagattccaacggtcatagaaacaactgttgcattcaataaaattggggtgcctaatgctactggaagtggaacttgagatagggcctaatttgttatacatattagccaacatgttggcttagtaagtctaatgaagcttccataggagtattgaaaggcagttttaccaggcctcaagctagacagatttggcaacctctgtatttgggttacagtcaacctatttggatacttggcaaaagattcttgctgtcagcatataaaatgtgcttgtcatttgtatcaattgacctttccccaaatcatgcagtattgagttatgacttgttaaatctattcccatgccagaatcttatcaatacataagaaatttaggaagattaggtgccaaaatacccagcacaatacttgtatatttttagtaccatacagaagtaaaatcccaggaactatgaacactagaccttatgtggtttattccttcaatcatttcaaacattgaaagtagggcctacatggttatttgcctgctcactttatgtttacatctcccacattcataccaatatacgtcaggtttgcttaaccattgattttttttttttttaccaagtcttacagtgattattttacgtgtttccatgtatctcactttgtgctgtattaaaaaaacctccattttgaaaatctacgttgtacagaagcacatgtctttaatgtcttcagacaaaaaagccttacattaatttaatgtttgcactctgaggtgcaacttaacagggagggcctgagaaaagaatgggagggggctattaattattttttagcaaaatgttgcctttgtcttgtgcaaacatgtagaatatgctctttaatctagtaaaatatttttttaaaaggtagagatgctttgttattgtaatcataaacttcctgaaattcttgtaattttttcccatacttatcagaagtgtgtttaccaacttatttttgtttgaaagtgtgattttttttttccttcccaacctctcttgcaaaaaaagaaatgggtttctgctaatgaattgagcagagatctaatattttatatgccttttgagctgtgtaagttaatatttgatacttgacaatttgttttattatgtaattgataaaatggtgatgtgtattaatgttagttcaaccatatatttatactgtctggggatgtgtggttatagttctgtgggagaaataattttgtcagtgttcaccagcttgtaaaaacttagtgcgagagctgaaacatctaaataaataatgacatgcatttatcatcattgaaa

SEQ ID NO: 161 - DNA, 997 bp, Homo sapiens
ttcaccgacctcaatctggtgcagtccctcaggcagtttctatggagctttcgcctacccggagaggcccagaaaattgaccggatgatggaggccttcgcccagcgatactgcctgtgcaaccctggggttttccagtccacagacacgtgctatgtgctgtccttcgccgtcatcatgctcaacaccagtctccacaatcccaatgtccgggacaagccgggcctggagcgctttgtggccatgaaccggggcatcaacgagggcggggacctgcctgaggagctgctcaggaacctgtacgacagcatccgaaatgagcccttcaagattcctgaggatgacgggaatgacctgacccacaccttcttcaacccggaccgggagggctggctcctgaagctgggagggggccgggtgaagacgtggaagcggcgctggtttatcctcacagacaactgcctctactactttgagtacaccacggacaaggagccccgaggaatcatccccctggagaatctgagcatccgagaggtggacgacccccggaaaccgaactgctttgaactttacatccccaacaacaaggggcagctcatcaaagcctgcaaaactgaggcggacggccgagtggtggagggaaaccacatggtgtaccggatctcggcccccacacaggaggagaaggacgagtggatcaagtccatccagtcggctgtgagtgtggaccccttctatgagattctgacagcgagagagaagcggatttcagtcaagaagaagcaggagcagccctgaccccctgcccccaactccattatttattacggagctgccccgcctgggtggccggacccctgggccttggggctgtggatcctggttccctgtttggaaaattcaccacctctagctcctcactgttctttgtaattaacacgctgttggtaatcttattaattatttaaaaaaaaaaaaaaaaaaaaaaaaaaaa

SEQ ID NO: 162 - DNA, 3054 bp, Homo sapiens
agcatttcaggccccggacaggaggcagtgccgcttcggccgaaggccgagccgcccgagggctctgggatggtgtgggaccggcaaaccaagatggagtatgagtggaaacctgacgagcaagggcttcagcaaatcctgcagctgttgaaggagtcccagtccccagacaccaccatccagagaaccgtgcaacaaaaactggaacaacttaatcagtatccagactttaacaactacttgatttttgttcttacaaaattaaaatctgaagatgaacccacaagatcattgagtggtcttatcttgaagaataatgtgaaagcacactttcagaacttcccaaatggtgtaacagactttattaaaagtgaatgtttaaataatattggtgactcctctcctctgattagagccactgttggtattttgatcacaactatagcctccaagggagaattgcagaattggcctgacctcttaccaaaactctgtagcctgttggattctgaagattataatacctgtgagggagcatttggtgcccttcagaagatttgtgaagattctgctgagattttagacagtgatgttttagatcgtcctctcaacatcatgattcccaaatttttacagttcttcaagcatagtagtccaaaaataaggtctcacgctgttgcatgtgtcaatcagtttatcatcagtaggactcaagctctaatgttgcacattgattcttttactgagaatctctttgcattagctggtgatgaagaaccagaggtacggaaaaatgtgtgccgagcacttgtgatgttgctcgaagttcgaatggatcgcctgcttcctcacatgcataatatagttgagtacatgctacagaggactcaagatcaagatgaaaatgtggctttagaagcctgtgaattttggctaactttagctgaacagccaatatgcaaagatgtactcgtaaggcatcttcctaagttgattcctgtgttagtgaatggcatgaagtactcagacatagatattatcctacttaagggtgatgttgaagaagacgaaacgattcctgatagtgaacaggatatacggccacgttttcaccgatcgaggacggtggctcagcagcatgatgaagatggaattgaagaggaagacgatgatgatgatgaaattgatgatgatgatacaatttcagactggaatctaagaaaatgttctgctgctgccctggatgttcttgcaaatgtgtatcgtgatgaactgctgccacatattttgccccttttgaaagaattactttttcatcatgaatgggttgttaaagaatcaggcattttggttttaggagcaattgctgaaggttgcatgcagggcatgattccatacttgcctgagcttattcctcaccttattcagtgcctctctgataaaaaggctcttgtgcgttccataacatgctggactcttagccgctatgcacactgggtggtcagccagccgccagacacgtacctgaagccattaatgacagaattgctaaagcgcatcctggacagcaacaagagagtacaagaagctgcctgcagtgcctttgctaccctagaagaggaggcttgtacagaacttgttccttaccttgcttatatacttgataccctggtctttgcatttagtaaataccagcataagaacctgctcattctttacgatgccataggaacattagcagattcagtaggacatcatttaaacaaaccagaatatattcagatgctaatgcctccactgatccagaaatggaacatgttaaaggatgaagataaagatctcttccctttacttgagtgcctatcttcagttgccacagcactgcagtctggattccttccgtactgtgaacctgtgtatcagcgttgtgtaaacctagtacagaagactcttgcacaagccatgctaaacaatgctcaaccagatcaatatgaagctccagataaagattttatgatagtggctcttgatttactgagtggcctggctgaaggacttggaggcaacattgaacagctggtagcccgaagtaacatcctgacactaatgtatcagtgcatgcaggataaaatgccagaagttcgacagagttcttttgccctgttaggtgacctcacaaaagcttgctttcagcatgttaagccttgtatagctgatttcatgccaatattgggaaccaacctaaatccagaattcatttcagtctgcaacaatgccacatgggcaattggagaaatctccattcaaatgggtatagagatgcagccttatattcctatggtgttgcaccagcttgtagaaatcattaacagacccaacacaccaaagacgttgttagagaatacagcaataacaattggtcgtcttggttacgtttgtcctcaagaggtggcccccatgctacagcagtttataagaccctggtgcacctctctgagaaacataagagacaatgaggaaaaggattcagcattccgtggaatttgtaccatgatcagtgtgaatcccagtggcgtaatccaagattttatatttttttgtgatgccgttgcatcatggattaacccaaaagatgatctcagagacatgttctgtaagatccttcatggatttaaaaatcaagttggcgatgaaaattggaggcgtttctctgaccagtttcctcttcccttaaaagagcgtcttgcagctttttatggtgtttaatctaatacacttaagctgcagtcccaaaattaggggtccttcagtcttggagactataagggagcctctgcacccagggaaaatgttaccctttacaggggggaagggtaaaccagtagggaatacagtacaatcccaaccctactgggaggggcgggagggaggtgttgccgtcactgtattaagtcgatgttgggaaacgttttaacatctggagcctttgtgggtggaaatatgtctccagttacaactccgcagtggatgtgaagaagcaaaaaaaaaaaaaaa

SEQ ID NO: 163 - DNA, 1743 bp, Homo sapiens
ggcgcggggacgcgggtttctgcctcaggccctgccctgctctactctgcgctctctgcccgcgccgccgccgcctcagcctcggccctgcgctgcgcgcccggcccgtgctgccatggcctgccgcccgcgaagcccgccgaggcatcagagccgctgcgacggtgacgccagcccgccgtcccccgcgcgatggagcctgggacggaagcgcagagccgacggcaggcgctggaggcccgaagacgccgaggaggcagagcaccgcggcgccgagcgcagacccgagagctttaccactcctgaaggccctaaaccccgttccagatgctctgactgggcaagtgcagttgaagaagatgaaatgaggaccagagttaacaaagaaatggcaagatataaaaggaaactcctcatcaatgactttggaagagagagaaaatcatcatcaggaagttctgattcaaaggagtctatgtctactgtgccggctgactttgagacagatgaaagtgtcctaatgaggagacagaagcagatcaactatgggaagaacacaattgcctacgatcgttatattaaagaagtcccaagacaccttcgacaacctggcattcatcccaagacccctaataaatttaagaagtatagtcgacgttcatgggaccagcaaatcaaactctggaaggtggctctgcatttttgggatcctccagcggaagaaggatgtgatttgcaagaaatacaccctgtagaccttgaatctgcagaaagcagctccgagccccagaccagctctcaggatgactttgatgtgtactctggcacacccaccaaggtgagacacatggacagtcaagtggaggatgagtttgatttggaagcttgtttaactgaacccttgagagacttctcagccatgagctaactgccccctggcggccaggaagagaaacagctcctccccgactaggtggaaggctggccaggcaccaagcatgtgtgtgcacttgtacctggtggtttctctgttagcagtccattagctcatgctgaattatttttgccttactttcttaagaaacattaattttatgtatagtgagtatattttgcatgttttaaattgtaaatggagctaagtccaagaaagtacttgaagctctcttccagcgagcttaattgcgtaatccctgttgtcctccagggtaagctgacacgtctacataactggttttccacaggcatcttcagttattgcttgtcaggtggactgttttggatttaaccatgtaatccatgggaccaattgagagtcagctacttttataggcatcaaagtattctcagacacctttaatatctttatggaaacttaatttttggccttttatcaatatgtcataacagcattctgaagtcagacattgttaaattgagctattaaactaatgagttttatgtaagttatatggtcttaatttggtatttgtaaatagcactagttagactctttagaatactccaagagttagggcagcagagtggagcgatttagaaagaacattttaaaacaatcagttaatttaccatgtaaaattgctgtaaatgataatgtgtacagattttctgttcaaatattcaattgtaaacttcttgttaagactgttacgtttctattgcttttgtatgggatattgcaaaaataaaaaggaaagaaccctcaaaaaaaaaaaaaaaaaa

SEQ ID NO: 164 - DNA, 3768 bp, Homo sapiens
cctctgacccttttggtcgctaggagtcagccgactcagtacacaggactcactgaatggagacacaaggctcctccagggagtggcggctcatggcaatcctagaatggtcaccagccaggctttagagacccacacagagggcgttctgacccaaagttgcactggggaactccaagtttggggattctttgaatttaactctttttctagctacatttcctattatttgtccaattcttaccaaacatctctgttcacattctgaagctgggatctgactggcagagctagtagatgctgactattcagatggagccctgacattggctttctcagcttggctgtgactggcagcaggtttgcgggagaactgtgtgtcccagaacatgactggctacacctgcacctcagcaagattggggcagggcagttatcttcaaaaagctgtgtaggtggggcagtcattactgacaaatccagtgcagacccaggatggcccaaacactggcttatcctttctgaatctcatctcccacagctgtaaagcggggtggtgctcgctacctcacagaggtgttgtaaagattagatgtaatcttgccaagcagccactttgtaaactgtatagtcttatgcagatggaaggaagggcctgtgcctaccttgatcatagcactaaacaaactgtactgtattttcattcctcttagttatctccctaaaaagactctgagttccttgaacacaggaaggtgttttatttgattttgttatcctcagcatgtagcagtgtctgacacacagtaggtgctctatcactgtgagagggatggatggatgggtggagttacagatggatagaaggatagatggagggatgggtggatgatggatggatagatggatggaggggggatgatgaatggagggataatgagtggatgaatgagggaatgggtggatggatggatggagggatggaggaacagatagatagatggagggatgggtgggtgatggatggatagatggatggagggagggatgatgaatggagggataatgaatggatgaatgaggggatgggtggatggatgaatggagggatgatgggtggatgaatgaattgagggatggatggatgaacacatggatggatggatagatggatagatggaggaactggtggattttggatggatgggtggatggatagatgaatgaatgcctggatagacaaagagatgatggatagatgaatagatgaattaagggatgtcggatagatggagggattgatagatgttggatggatgggtggtggatggatagatgagtgaatgcatggatagacaaagagatgatggatggatgaattaagggatgacagatggatggatggatgagtaactggatggacaagtggataaatggatagatggttgaatacctgaatggattgaaggaggatgcatggatgtaagataaggctaatcatcctccactctctttctttgcaaaaccatccacccatttactcaataaacatttattcagttcaaacttggcacaaagcaccatgtgaggcccaagagatacgtgggttaataaaacagagctcctgccctcctgaaaactgcaaagaaaggggcgtggcttcctgagttcaaatcccaactctgccagcgactagctgtacatcagtgatgtttccctactttctctcaattaaatagggataatgtcagtacctatcacattgggaggtcttgcggggattaaatgagttaccaaatgccaagtgtttgggacagggcctggcacccagcaaagtctcttgtgagtgctggctgctattatcctaatggagaagatggcatgaaaaccaggaaataggatgccctttgggaagcaatgcaacaggaacttacacaaagaaaggaaaggaggaagcaattagtggtgtctcaaaggagtatgtcaagaaaaacttttcagagggaaacctttgagcagggccatgaaaacaggagttctctaagagattgtggacttgcctgggaccacctggctataagcacaaaaccatccggttcctttctgtcacttctggcgggtgaggggtctctggcaaaggggcagaaggtgcgtgagaggttgcgaatggcaggactgtcctggccagccggggcacctggtggccaagcttagaaacatgacaggtcctcttgggagggctgaccgcagggagcgttgggtttcaggctgctggcgtcggcttctgtggtgccctttctgtcggctatgagagtccagacagtgcccaacctcctccccttctttccacacgcacaaccaccccaccccctgtggcctgagctgtcctgcctcgccacaatggcacctgccctaaaatagcttcccatgtgagggctagagaaaggaaaagattagaccctccctggatgagagagagaaagtgaaggagggcaggggagggggacagcgagccattgagcgatctttgtcaagcatcccagaaggtataaaaacgcccttgggaccaggcagcctcaaaccccagctgttggggccaggacacccagtgagcccatacttgctctttttgtcttcttcagactgcgccatggggctcagcgacggggaatggcagttggtgctgaacgtctgggggaaggtggaggctgacatcccaggccatgggcaggaagtcctcatcaggtaaaaggaagagattccattgcccctgccacccacaccctaagatcaagggtgttcagctgcaaggtggaaagtttgcacgtggggtaggtcagttggctgcattagttaagggtgttagaacggtcacttgctttttctttgcttttaagtgtcagggattggactcaggagagggaaaggagccatttcaggctgatatcagcagctggaggaagcatgagaatcaaacctaggatgctcagagtccaccaggaagaattttagaattatagacagtcagagttaacaagggtcctgagagattttgtacagccacctctcttacaggatgaggacaaaaagcgactgagaaggggaggacatttccagagtcacagctcattaaatgctcttaaagtgtcaaggttaagacatgctcttcaaggggagacagatctggttctagacttggctctgccactgagccactgggtgacctttgggaaggtactcaacctctcggagcctcaatttcctctcctgtacagtgaggggatatcctaatatctatatcctagaggagatgtgagaattaaataaaataatgcatgcaagaggcctggcatggttcctggcatatactgagtcctagaaatgttagtagctattactgatgaagcccaggctagggacctttcaaagcattgcaattagagaacagaagatagaggctcattagtgaccttcgatgttgagtatgtctctagtttgagaggtctgaatgatgtggtctgcaagtatatcctgccttctaccacaagggattccagaatacaccaaagaaaacaaaattctgaggtttgtaaatagagggtggctgtggtttgtacatagaagctcatctcctcgttgccttctatcccaaaggtgatacactcttctcttggccccttccctcaccattctgagctggttccctcagaagtctaataggttaagaatcaacgtttctgccaacgggaggaaggaagtgggcgccgg

SEQ ID NO: 165 - DNA, 1172 bp, Homo sapiens
gagacattcctcaattgcttagacatattctgagcctacagcagaggaacctccagtctcagcaccatgaatcaaactgcgattctgatttgctgccttatctttctgactctaagtggcattcaaggagtacctctctctagaaccgtacgctgtacctgcatcagcattagtaatcaacctgttaatccaaggtctttagaaaaacttgaaattattcctgcaagccaattttgtccacgtgttgagatcattgctacaatgaaaaagaagggtgagaagagatgtctgaatccagaatcgaaggccatcaagaatttactgaaagcagttagcaaggaaatgtctaaaagatctccttaaaaccagaggggagcaaaatcgatgcagtgcttccaaggatggaccacacagaggctgcctctcccatcacttccctacatggagtatatgtcaagccataattgttcttagtttgcagttacactaaaaggtgaccaatgatggtcaccaaatcagctgctactactcctgtaggaaggttaatgttcatcatcctaagctattcagtaataactctaccctggcactataatgtaagctctactgaggtgctatgttcttagtggatgttctgaccctgcttcaaatatttccctcacctttcccatcttccaagggtactaaggaatctttctgctttggggtttatcagaattctcagaatctcaaataactaaaaggtatgcaatcaaatctgctttttaaagaatgctctttacttcatggacttccactgccatcctcccaaggggcccaaattctttcagtggctacctacatacaattccaaacacatacaggaaggtagaaatatctgaaaatgtatgtgtaagtattcttatttaatgaaagactgtacaaagtataagtcttagatgtatatatttcctatattgttttcagtgtacatggaataacatgtaattaagtactatgtatcaatgagtaacaggaaaattttaaaaatacagatagatatatgctctgcatgttacataagataaatgtgctgaatggttttcaaataaaaatgaggtactctcctggaaatattaagaaagactatctaaatgttgaaagatcaaaaggttaataaagtaattataact

SEQ ID NO: 166 - DNA, 1550 bp, Homo sapiens
tcaacgcctgcctcccctcgagcgtcctcagcgcagccgccgcccgcggagccagcacgaacgagcccagcaccggccggatggagcgtccgcaacccgacagcatgccccaggatttgtcagaggccctgaaggaggccaccaaggaggtgcacacccaggcagagaatgctgagttcatgaggaactttcagaagggccaggtgacccgagacggcttcaagctggtgatggcctccctgtaccacatctatgtggccctggaggaggagattgagcgcaacaaggagagcccagtcttcgcccctgtctacttcccagaagagctgcaccgcaaggctgccctggagcaggacctggccttctggtacgggccccgctggcaggaggtcatcccctacacaccagccatgcagcgctatgtgaagcggctccacgaggtggggcgcacagagcccgagctgctggtggcccacgcctacacccgctacctgggtgacctgtctgggggccaggtgctcaaaaagattgcccagaaagccctggacctgcccagctctggcgagggcctggccttcttcaccttccccaacattgccagtgccaccaagttcaagcagctctaccgctcccgcatgaactccctggagatgactcccgcagtcaggcagagggtgatagaagaggccaagactgcgttcctgctcaacatccagctctttgaggagttgcaggagctgctgacccatgacaccaaggaccagagcccctcacgggcaccagggcttcgccagcgggccagcaacaaagtgcaagattctgcccccgtggagactcccagagggaagcccccactcaacacccgctcccaggctccgcttctccgatgggtccttacactcagctttctggtggcgacagttgctgtagggctttatgccatgtgaatgcaggcatgctggctcccagggccatgaactttgtccggtggaaggccttctttctagagagggaattctcttggctggcttccttaccgtgggcactgaaggctttcagggcctccagccctctcactgtgtccctctctctggaaaggaggaaggagcctatggcatcttccccaacgaaaagcacatccaggcaatggcctaaacttcagagggggcgaaggggtcagccctgcccttcagcatcctcagttcctgcagcagagcctggaagacaccctaatgtggcagctgtctcaaacctccaaaagccctgagtttcaagtatccttgttgacacggccatgaccactttccccgtgggccatggcaatttttacacaaacctgaaaagatgttgtgtcttgtgtttttgtcttatttttgttggagccactctgttcctggctcagcctcaaatgcagtatttttgttgtgttctgttgtttttatagcagggttggggtggtttttgagccatgcgtgggtggggagggaggtgtttaacggcactgtggccttggtctaacttttgtgtgaaataataaacaacattgtctg

SEQ ID NO: 167 - DNA, 1585 bp, Homo sapiens
acagcagttacactgcggcgggcgtctgttctagtgtttgagccgtcgtgcttcaccggtctacctcgctagcatgtcgggccgcggcaagactggcggcaaggcccgcgccaaggccaagtcgcgctcgtcgcgcgccggcctccagttcccagtgggccgtgtacaccggctgctgcggaagggccactacgccgagcgcgttggcgccggcgcgccagtgtacctggcggcagtgctggagtacctcaccgctgagatcctggagctggcgggcaatgcggcccgcgacaacaagaagacgcgaatcatcccccgccacctgcagctggccatccgcaacgacgaggagctcaacaagctgctgggcggcgtgacgatcgcccagggaggcgtcctgcccaacatccaggccgtgctgctgcccaagaagaccagcgccaccgtggggccgaaggcgccctcgggcggcaagaaggccacccaggcctcccaggagtactaagagggcccgcgccgcggccggccgccccagctccccatgccaccacaaaggcccttttaagggccaccaccgccctcatggaaagagctgagccgcttcagactgcggggcaagcgggccgcggctcccttcccctcccctcccctcgcccgccttcgccgcccggcctcgagtccccgcccgcccccgctcccgtcccgcaccgcctgccgcgtcggcctcgggcctgccctgtccgccgtccgccctccggtagggttcgggccttccggatgcggcttgggcgctcttcggggacctccgtggcgcggaagacccgagcctgccggggggaggccggcggcgccgcacctgcccgcctcggcgttcgtgactcagccgccccatcccgagtcgctaaggggctgcggggaggccgcagcaccttctggaagacttggccttccgctctgacgcagggccgaggtgggcagtccaggccgagagccggcggccctgaaggtgagtgaggccctcggcagctgcagccggggtgtctggtacccccccggcgtggtgcttagcccaggactttcagacggccgctggccgggaggctttggtgggagagacgcgatcgccgatttcggtctggcgccccttctgcggccgggacccaggcctttcacatcagctctccctccatcttcattcataggtctgcgctggggccgggacgaagcacttggtaacaggcacatcttcctcccgagtgactgcctcctaggaggacatttaggggagggcagaggcctgcagtttggcttcacggctggctatgtggacagcaagagtcgttttgcggaacgcgactggcagccaggcctgtcgggcccccgacgccgccccatttcccttccagcaaactcaactcggcaatccaagcacctagataccagcacaagtcggttaatccctgtctggactgagcctccgttggcttctgaactggaattctgcagctaacccttccacgactagaaccttaggcattggggagttttagatggactaattttattaaaggattgtttttttttt

SEQ ID NO: 168 - DNA, 627 bp, Homo sapiens
agtctccggcgagttgttgcctgggctggacgtggttttgtctgctgcgcccgctcttcgcgctctcgtttcattttctgcagcgcgccacgaggatggcccacaagcagatctactactcggacaagtacttcgacgaacactacgagtaccggcatgttatgttacccagagaactttccaaacaagtacctaaaactcatctgatgtctgaagaggagtggaggagacttggtgtccaacagagtctaggctgggttcattacatgattcatgagccagaaccacatattcttctctttagacgacctcttccaaaagatcaacaaaaatgaagtttatctggggatcgtcaaatctttttcaaatttaatgtatatgtgtatataaggtagtattcagtgaatacttgagaaatgtacaaatctttcatccatacctgtgcatgagctgtattcttcacagcaacagagctcagttaaatgcaactgcaagtaggttactgtaagatgtttaagataaaagttcttccagtcagtttttctcttaagtgcctgtttgagtttactgaaacagtttacttttgttcaataaagtttgtatgttgcatttaaaaaaaaaaaaaaa

SEQ ID NO: 169 - DNA, 2161 bp, Homo sapiens
gggcgatcctgccggagccccgccgccgccggcttggattctgaaaccttccttgtatccctcctgagacatctttgctgcaagatcgaggctgtcctctggtgagaaggtggtgaggcttcccgtcatattccagctctgaacagcaacatggggtgcaaagtcctgctcaacattgggcagcagatgctgcggcggaaggtggtggactgtagcccggaggagacgcggctgtctcgctgcctgaacacttttgatctggtggccctcggggtgggcagcacactgggtgctggtgtctacgtcctggctggagctgtggcccgtgagaatgcaggccctgccattgtcatctccttcctgatcgctgcgctggcctcagtgctggctggcctgtgctatggcgagtttggtgctcgggtccccaagacgggctcagcttacctctacagctatgtcaccgttggagagctctgggccttcatcaccggctggaacttaatcctctcctacatcatcggtacttcaagcgtagcgagggcctggagcgccaccttcgacgagctgataggcagacccatcggggagttctcacggacacacatgactctgaacgcccccggcgtgctggctgaaaaccccgacatattcgcagtgatcataattctcatcttgacaggacttttaactcttggtgtgaaagagtcggccatggtcaacaaaatattcacttgtattaacgtcctggtcctgggcttcataatggtgtcaggatttgtgaaaggatcggttaaaaactggcagctcacggaggaggattttgggaacacatcaggccgtctctgtttgaacaatgacacaaaagaagggaagcccggtgttggtggattcatgcccttcgggttctctggtgtcctgtcgggggcagcgacttgcttctatgccttcgtgggctttgactgcatcgccaccacaggtgaagaggtgaagaacccacagaaggccatccccgtggggatcgtggcgtccctcttgatctgcttcatcgcctactttggggtgtcggctgccctcacgctcatgatgccctacttctgcctggacaataacagccccctgcccgacgcctttaagcacgtgggctgggaaggtgccaagtacgcagtggccgtgggctccctctgtgctctttccgccagtcttctaggttccatgtttcccatgcctcgggttatctatgccatggctgaggatggactgctatttaaattcttagccaacgtcaatgataggaccaaaacaccaataatcgccacattagcctcgggtgccgttgctgctgtgatggccttcctctttgacctgaaggacttggtggacctcatgtccattggcactctcctggcttactcgttggtggctgcctgtgtgttggtcttacggtaccagccagagcagcctaacctggtataccagatggccagtacttccgacgagttagatccagcagaccaaaatgaattggcaagcaccaatgattcccagctggggtttttaccagaggcagagatgttctctttgaaaaccatactctcacccaaaaacatggagccttccaaaatctctgggctaattgtgaacatttcaaccagccttatagctgttctcatcatcaccttctgcattgtgaccgtgcttggaagggaggctctcaccaaaggggcgctgtgggcagtctttctgctcgcagggtctgccctcctctgtgccgtggtcacgggcgtcatctggaggcagcccgagagcaagaccaagctctcatttaaggttcccttcctgccagtgctccccatcctgagcatcttcgtgaacgtctatctcatgatgcagctggaccagggcacctgggtccggtttgctgtgtggatgctgataggcttcatcatctactttggctatggcctgtggcacagcgaggaggcgtccctggatgccgaccaagcaaggactcctgacggcaacttggaccagtgcaagtgacgcacagccccgccccccggaggtggcagcagccccgagggacgcccccagaggaccgggaggcaccccaccctccccaccagtgcaacagaaaccacctgcgtccacaccctcactgcag

SEQ ID NO: 170 - DNA, 2824 bp, Homo sapiens
gcggccgctttcgatttcgctttcccctaaatggctgagcttctcgccagcgcaggatcagcctgttcctgggactttccgagagccccgccctcgttccctcccccagccgccagtaggggaggactcggcggtacccggagcttcaggccccaccggggcgcggagagtcccagacccggccgggaccgggacggcgtccgagtgccaatggctagctctaggtgtcccgctccccgcgggtgccgctgcctccccggagcttctctcgcatggctggggacagtactgctacttctcgccgactgggtgctgctccggaccgcgctgccccgcatattctccctgctggtgcccaccgcgctgccactgctccgggtctgggcggtgggcctgagccgctgggccgtgctctggctgggggcctgcggggtcctcagggcaacggttggctccaagagcgaaaacgcaggtgcccagggctggctggctgctttgaagccattagctgcggcactgggcttggccctgccgggacttgccttgttccgagagctgatctcatggggagcccccgggtccgcggatagcaccaggctactgcactggggaagtcaccctaccgccttcgttgtcagttatgcagcggcactgcccgcagcagccctgtggcacaaactcgggagcctctgggtgcccggcggtcagggcggctctggaaaccctgtgcgtcggcttctaggctgcctgggctcggagacgcgccgcctctcgctgttcctggtcctggtggtcctctcctctcttggggagatggccattccattctttacgggccgcctcactgactggattctacaagatggctcagccgataccttcactcgaaacttaactctcatgtccattctcaccatagccagtgcagtgctggagttcgtgggtgacgggatctataacaacaccatgggccacgtgcacagccacttgcagggagaggtgtttggggctgtcctgcgccaggagacggagtttttccaacagaaccagacaggtaacatcatgtctcgggtaacagaggacacgtccaccctgagtgattctctgagtgagaatctgagcttatttctgtggtacctggtgcgaggcctatgtctcttggggatcatgctctggggatcagtgtccctcaccatggtcaccctgatcaccctgcctctgcttttccttctgcccaagaaggtgggaaaatggtaccagttgctggaagtgcaggtgcgggaatctctggcaaagtccagccaggtggccattgaggctctgtcggccatgcctacagttcgaagctttgccaacgaggagggcgaagcccagaagtttagggaaaagctgcaagaaataaagacactcaaccagaaggaggctgtggcctatgcagtcaactcctggaccactagtatttcaggtatgctgctgaaagtgggaatcctctacattggtgggcagctggtgaccagtggggctgtaagcagtgggaaccttgtcacatttgttctctaccagatgcagttcacccaggctgtggaggtactgctctccatctaccccagagtacagaaggctgtgggctcctcagagaaaatatttgagtacctggaccgcacccctcgctgcccacccagtggtctgttgactcccttacacttggagggccttgtccagttccaagatgtctcctttgcctacccaaaccgcccagatgtcttagtgctacaggggctgacattcaccctacgccctggcgaggtgacggcgctggtgggacccaatgggtctgggaagagcacagtggctgccctgctgcagaatctgtaccagcccaccgggggacagctgctgttggatgggaagccccttccccaatatgagcaccgctacctgcacaggcaggtggctgcagtgggacaagagccacaggtatttggaagaagtcttcaagaaaatattgcctatggcctgacccagaagccaactatggaggaaatcacagctgctgcagtaaagtctggggcccatagtttcatctctggactccctcagggctatgacacagaggtagacgaggctgggagccagctgtcagggggtcagcgacaggcagtggcgttggcccgagcattgatccggaaaccgtgtgtacttatcctggatgatgccaccagtgccctggatgcaaacagccagttacaggtggagcagctcctgtacgaaagccctgagcggtactcccgctcagtgcttctcatcacccagcacctcagcctggtggagcaggctgaccacatcctctttctggaaggaggcgctatccgggaggggggaacccaccagcagctcatggagaaaaaggggtgctactgggccatggtgcaggctcctgcagatgctccagaatgaaagccttctcagacctgcgcactccatctccctcccttttcttctctctgtggtggagaaccacagctgcagagtagcagctgcctccaggatgagttacttgaaatttgccttgagtgtgttacctcctttccaagctcctcgtgataatgcagacttcctggagtacaaacacaggatttgtaattcctactgtaacggagtttagagccagggctgatgctttggtgtggccagcactctgaaactgagaaatgttcagaatgtacggaaagatgatcagctattttcaacataactgaaggcatatgctggcccataaacaccctgtaggttcttgatatttataataaaattggtgttttgt

SEQ ID NO: 171 - DNA, 2247 bp, Homo sapiens
ccggggcggatggctccggccgcctggctccgcagcgcggccgcgcgcgccctcctgcccccgatgctgctgctgctgctccagccgccgccgctgctggcccgggctctgccgccggacgtccaccacctccatgccgagaggagggggccacagccctggcatgcagccctgcccagtagcccggcacctgcccctgccacgcaggaagccccccggcctgccagcagcctcaggcctccccgctgtggcgtgcccgacccatctgatgggctgagtgcccgcaaccgacagaagaggttcgtgctttctggcgggcgctgggagaagacggacctcacctacaggatccttcggttcccatggcagttggtgcaggagcaggtgcggcagacgatggcagaggccctaaaggtatggagcgatgtgacgccactcacctttactgaggtgcacgagggccgtgctgacatcatgatcgacttcgccaggtactggcatggggacgacctgccgtttgatgggcctgggggcatcctggcccatgccttcttccccaagactcaccgagaaggggatgtccacttcgactatgatgagacctggactatcggggatgaccagggcacagacctgctgcaggtggcagcccatgaatttggccacgtgctggggctgcagcacacaacagcagccaaggccctgatgtccgccttctacacctttcgctacccactgagtctcagcccagatgactgcaggggcgttcaacacctatatggccagccctggcccactgtcacctccaggaccccagccctgggcccccaggctgggatagacaccaatgagattgcaccgctggagccagacgccccgccagatgcctgtgaggcctcctttgacgcggtctccaccatccgaggcgagctctttttcttcaaagcgggctttgtgtggcgcctccgtgggggccagctgcagcccggctacccagcattggcctctcgccactggcagggactgcccagccctgtggacgctgccttcgaggatgcccagggccacatttggttcttccaaggtgctcagtactgggtgtacgacggtgaaaagccagtcctgggccccgcacccctcaccgagctgggcctggtgaggttcccggtccatgctgccttggtctggggtcccgagaagaacaagatctacttcttccgaggcagggactactggcgtttccaccccagcacccggcgtgtagacagtcccgtgccccgcagggccactgactggagaggggtgccctctgagatcgacgctgccttccaggatgctgatggctatgcctacttcctgcgcggccgcctctactggaagtttgaccctgtgaaggtgaaggctctggaaggcttcccccgtctcgtgggtcctgacttctttggctgtgccgagcctgccaacactttcctctgaccatggcttggatgccctcaggggtgctgacccctgccaggccacgaatatcaggctagagacccatggccatctttgtggctgtgggcaccaggcatgggactgagcccatgtctcctgcagggggatggggtggggtacaaccaccatgacaactgccgggagggccacgcaggtcgtggtcacctgccagcgactgtctcagactgggcagggaggctttggcatgacttaagaggaagggcagtcttgggacccgctatgcaggtcctggcaaacctggctgccctgtctcatccctgtccctcagggtagcaccatggcaggactgggggaactggagtgtccttgctgtatccctgttgtgaggttccttccaggggctggcactgaagcaagggtgctggggccccatggccttcagccctggctgagcaactgggctgtagggcagggccacttcctgaggtcaggtcttggtaggtgcctgcatctgtctgccttctggctgacaatcctggaaatctgttctccagaatccaggccaaaaagttcacagtcaaatggggaggggtattcttcatgcaggagaccccaggccctggaggctgcaacatacctcaatcctgtcccaggccggatcctcctgaagcccttttcgcagcactgctatcctccaaagccattgtaaatgtgtgtacagtgtgtataaaccttcttcttcttttttttttttaaactgaggattgtcattaaacacagttgttttct

SEQ ID NO: 172 - DNA, 5434 bp, Homo sapiens
cgtccgcgtggggggggtgtgtgcccgccttgcgcatgcgtgttccctgggcatggccggctccgttccatccttctgcacagggtatcgcctctctccgtttggtacatcccctcctcccccacgcccggactggggtggtagacgcgcctccgctcatcgcccctccccatcggtttccgcgcgaaaagccggggcgcctgcgctgccgccgccgcgtctgctgaagcctccgagatgccggcgcgtaccgccccagcccgggtgcccacactggccgtcccggccatctcgctgcccgacgatgtccgcaggcggctcaaagatttggaaagagacagcttaacagaaaaggaatgtgtgaaggagaaattgaatctcttgcacgaatttctgcaaacagaaataaagaatcagttatgtgacttggaaaccaaattacgtaaagaagaattatccgaggagggctacctggctaaagtcaaatcccttttaaataaagatttgtccttggagaacggtgctcatgcttacaaccgggaagtgaatggacgtctagaaaacgggaaccaagcaagaagtgaagcccgtagagtgggaatggcagatgccaacagcccccccaaacccctttccaaacctcgcacgcccaggaggagcaagtccgatggagaggctaagcctgaaccttcacctagccccaggattacaaggaaaagcaccaggcaaaccaccatcacatctcattttgcaaagggccctgccaaacggaaacctcaggaagagtctgaaagagccaaatcggatgagtccatcaaggaagaagacaaagaccaggatgagaagagacgtagagttacatccagagaacgagttgctagaccgcttcctgcagaagaacctgaaagagcaaaatcaggaacgcgcactgaaaaggaagaagaaagagatgaaaaagaagaaaagagactccgaagtcaaaccaaagaaccaacacccaaacagaaactgaaggaggagccggacagagaagccagggcaggcgtgcaggctgacgaggacgaagatggagacgagaaagatgagaagaagcacagaagtcaacccaaagatctagctgccaaacggaggcccgaagaaaaagaacctgaaaaagtaaatccacagatttctgatgaaaaagacgaggatgaaaaggaggagaagagacgcaaaacgacccccaaagaaccaacggagaaaaaaatggctcgcgccaaaacagtcatgaactccaagacccaccctcccaagtgcattcagtgcgggcagtacctggacgaccctgacctcaaatatgggcagcacccaccagacgcggtggatgagccacagatgctgacaaatgagaagctgtccatctttgatgccaacgagtctggctttgagagttatgaggcgcttccccagcacaaactgacctgcttcagtgtgtactgtaagcacggtcacctgtgtcccatcgacaccggcctcatcgagaagaatatcgaactcttcttttctggttcagcaaaaccaatctatgatgatgacccgtctcttgaaggtggtgttaatggcaaaaatcttggccccataaatgaatggtggatcactggctttgatggaggtgaaaaggccctcatcggcttcagcacctcatttgccgaatacattctgatggatcccagtcccgagtatgcgcccatatttgggctgatgcaggagaagatctacatcagcaagattgtggtggagttcctgcagagcaattccgactcgacctatgaggacctgatcaacaagatcgagaccacggttcctccttctggcctcaacttgaaccgcttcacagaggactccctcctgcgacacgcgcagtttgtggtggagcaggtggagagttatgacgaggccggggacagtgatgagcagcccatcttcctgacgccctgcatgcgggacctgatcaagctggctggggtcacgctgggacagaggcgagcccaggcgaggcggcagaccatcaggcattctaccagggagaaggacaggggacccacgaaagccaccaccaccaagctggtctaccagatcttcgatactttcttcgcagagcaaattgaaaaggatgacagagaagacaaggagaacgcctttaagcgccggcgatgtggcgtctgtgaggtgtgtcagcagcctgagtgtgggaaatgtaaagcctgcaaggacatggttaaatttggtggcagtggacggagcaagcaggcttgccaagagcggaggtgtcccaatatggccatgaaggaggcagatgacgatgaggaagtcgatgataacatcccagagatgccgtcacccaaaaaaatgcaccaggggaagaagaagaaacagaacaagaatcgcatctcttgggtcggagaagccgtcaagactgatgggaagaagagttactataagaaggtgtgcattgatgcggaaaccctggaagtgggggactgtgtctctgttattccagatgattcctcaaaaccgctgtatctagcaagggtcacggcgctgtgggaggacagcagcaacgggcagatgtttcacgcccactggttctgcgctgggacagacacagtcctcggggccacgtcggaccctctggagctgttcttggtggatgaatgtgaggacatgcagctttcatatatccacagcaaagtgaaagtcatctacaaagccccctccgaaaactgggccatggagggaggcatggatcccgagtccctgctggagggggacgacgggaagacctacttctaccagctgtggtatgatcaagactacgcgagattcgagtcccctccaaaaacccagccaacagaggacaacaagttcaaattctgtgtgagctgtgcccgtctggctgagatgaggcaaaaagaaatccccagggtcctggagcagctcgaggacctggatagccgggtcctctactactcagccaccaagaacggcatcctgtaccgagttggtgatggtgtgtacctgccccctgaggccttcacgttcaacatcaagctgtccagtcccgtgaaacgcccacggaaggagcccgtggatgaggacctgtacccagagcactaccggaaatactccgactacatcaaaggcagcaacctggatgcccctgagccctaccgaattggccggatcaaagagatcttctgtcccaagaagagcaacggcaggcccaatgagactgacatcaaaatccgggtcaacaagttctacaggcctgagaacacccacaagtccactccagcgagctaccacgcagacatcaacctgctctactggagcgacgaggaggccgtggtggacttcaaggctgtgcagggccgctgcaccgtggagtatggggaggacctgcccgagtgcgtccaggtgtactccatgggcggccccaaccgcttctacttcctcgaggcctataatgcaaagagcaaaagctttgaagatcctcccaaccatgcccgtagccctggaaacaaagggaagggcaagggaaaagggaagggcaagcccaagtcccaagcctgtgagccgagcgagccagagatagagatcaagctgcccaagctgcggaccctggatgtgttttctggctgcggggggttgtcggagggattccaccaagcaggcatctctgacacgctgtgggccatcgagatgtgggaccctgcggcccaggcgttccggctgaacaaccccggctccacagtgttcacagaggactgcaacatcctgctgaagctggtcatggctggggagaccaccaactcccgcggccagcggctgccccagaagggagacgtggagatgctgtgcggcgggccgccctgccagggcttcagcggcatgaaccgcttcaattcgcgcacctactccaagttcaaaaactctctggtggtttccttcctcagctactgcgactactaccggccccggttcttcctcctggagaatgtcaggaactttgtctccttcaagcgctccatggtcctgaagctcaccctccgctgcctggtccgcatgggctatcagtgcaccttcggcgtgctgcaggccggtcagtacggcgtggcccagactaggaggcgggccatcatcctggccgcggcccctggagagaagctccctctgttcccggagccactgcacgtgtttgctccccgggcctgccagctgagcgtggtggtggatgacaagaagtttgtgagcaacataaccaggttgagctcgggtcctttccggaccatcacggtgcgagacacgatgtccgacctgccggaggtgcggaatggagcctcggcactggagatctcctacaacggggagcctcagtcctggttccagaggcagctccggggcgcacagtaccagcccatcctcagggaccacatctgtaaggacatgagtgcattggtggctgcccgcatgcggcacatccccttggccccagggtcagactggcgcgatctgcccaacatcgaggtgcggctctcagacggcaccatggccaggaagctgcggtatacccaccatgacaggaagaacggccgcagcagctctggggccctccgtggggtctgctcctgcgtggaagccggcaaagcctgcgaccccgcagccaggcagttcaacaccctcatcccctggtgcctgccccacaccgggaaccggcacaaccactgggctggcctctatggaaggctcgagtgggacggcttcttcagcacaaccgtcaccaaccccgagcccatgggcaagcagggccgcgtgctccacccagagcagcaccgtgtggtgagcgtgcgggagtgtgcccgctcccagggcttccctgacacctaccggctcttcggcaacatcctggacaagcaccggcaggtgggcaatgccgtgccaccgcccctggccaaagccattggcttggagatcaagctttgtatgttggccaaagcccgagagagtgcctcagctaaaataaaggaggaggaagctgctaaggactagttctgccctcccgtcacccctgtttctggcaccaggaatccccaacatgcactgatgttgtgtttttaacatgtcaatctgtccgttcacatgtgtggtacatggtgtttgtggccttggctgacatgaagctgttgtgtgaggttcgcttatcaactaatgatttagtgatcaaattgtgcagtactttgtgcattctggattttaaaagttttttattatgcattatatcaaatctaccactgtatgagtggaaattaagactttatgtagtttttatatgttgtaatatttcttcaaataaatctctcctataaaccaaaaaaaaaaaaaaaaaaaaaaaaaa

SEQ ID NO: 173 - DNA, 1817 bp, Homo sapiens
ctgtcagaatggccaccatggtaccatccgtgttgtggcccagggcctgctggactctgctggtctgctgtctgctgaccccaggtgtccaggggcaggagttccttttgcgggtggagccccagaaccctgtgctctctgctggagggtccctgtttgtgaactgcagtactgattgtcccagctctgagaaaatcgccttggagacgtccctatcaaaggagctggtggccagtggcatgggctgggcagccttcaatctcagcaacgtgactggcaacagtcggatcctctgctcagtgtactgcaatggctcccagataacaggctcctctaacatcaccgtgtacgggctcccggagcgtgtggagctggcacccctgcctccttggcagccggtgggccagaacttcaccctgcgctgccaagtggagggtgggtcgccccggaccagcctcacggtggtgctgcttcgctgggaggaggagctgagccggcagcccgcagtggaggagccagcggaggtcactgccactgtgctggccagcagagacgaccacggagcccctttctcatgccgcacagaactggacatgcagccccaggggctgggactgttcgtgaacacctcagccccccgccagctccgaacctttgtcctgcccgtgacccccccgcgcctcgtggccccccggttcttggaggtggaaacgtcgtggccggtggactgcaccctagacgggctttttccagcctcagaggcccaggtctacctggcgctgggggaccagatgctgaatgcgacagtcatgaaccacggggacacgctaacggccacagccacagccacggcgcgcgcggatcaggagggtgcccgggagatcgtctgcaacgtgaccctagggggcgagagacgggaggcccgggagaacttgacggtctttagcttcctaggacccattgtgaacctcagcgagcccaccgcccatgaggggtccacagtgaccgtgagttgcatggctggggctcgagtccaggtcacgctggacggagttccggccgcggccccggggcagccagctcaacttcagctaaatgctaccgagagtgacgacggacgcagcttcttctgcagtgccactctcgaggtggacggcgagttcttgcacaggaacagtagcgtccagctgcgagtcctgtatggtcccaaaattgaccgagccacatgcccccagcacttgaaatggaaagataaaacgagacacgtcctgcagtgccaagccaggggcaacccgtaccccgagctgcggtgtttgaaggaaggctccagccgggaggtgccggtggggatcccgttcttcgtcaacgtaacacataatggtacttatcagtgccaagcgtccagctcacgaggcaaatacaccctggtcgtggtgatggacattgaggctgggagctcccactttgtccccgtcttcgtggcggtgttactgaccctgggcgtggtgactatcgtactggccttaatgtacgtcttcagggagcaccaacggagcggcagttaccatgttagggaggagagcacctatctgcccctcacgtctatgcagccgacagaagcaatgggggaagaaccgtccagagctgagtgacgctgggatccgggatcaaagttggcgggggcttggctgtgccctcagattccgcaccaataaagccttcaaactccctaaaaaaaaaaaaaaaaaaaaaaaaaaaaaaaaaaaaaaaaaaaaaaaaaaaaaaaaaaaaaaaaaaaaaaaaaaaaaaaaaaaaaa

SEQ ID NO: 174 - DNA, 2545 bp, Homo sapiens
atccaatacaggagtgacttggaactccattctatcactatgaagaaaagtggtgttcttttcctcttgggcatcatcttgctggttctgattggagtgcaaggaaccccagtagtgagaaagggtcgctgttcctgcatcagcaccaaccaagggactatccacctacaatccttgaaagaccttaaacaatttgccccaagcccttcctgcgagaaaattgaaatcattgctacactgaagaatggagttcaaacatgtctaaacccagattcagcagatgtgaaggaactgattaaaaagtgggagaaacaggtcagccaaaagaaaaagcaaaagaatgggaaaaaacatcaaaaaaagaaagttctgaaagttcgaaaatctcaacgttctcgtcaaaagaagactacataagagaccacttcaccaataagtattctgtgttaaaaatgttctattttaattataccgctatcattccaaaggaggatggcatataatacaaaggcttattaatttgactagaaaatttaaaacattactctgaaattgtaactaaagttagaaagttgattttaagaatccaaacgttaagaattgttaaaggctatgattgtctttgttcttctaccacccaccagttgaatttcatcatgcttaaggccatgattttagcaatacccatgtctacacagatgttcacccaaccacatcccactcacaacagctgcctggaagagcagccctaggcttccacgtactgcagcctccagagagtatctgaggcacatgtcagcaagtcctaagcctgttagcatgctggtgagccaagcagtttgaaattgagctggacctcaccaagctgctgtggccatcaacctctgtatttgaatcagcctacaggcctcacacacaatgtgtctgagagattcatgctgattgttattgggtatcaccactggagatcaccagtgtgtggctttcagagcctcctttctggctttggaagccatgtgattccatcttgcccgctcaggctgaccactttatttctttttgttcccctttgcttcattcaagtcagctcttctccatcctaccacaatgcagtgcctttcttctctccagtgcacctgtcatatgctctgatttatctgagtcaactcctttctcatcttgtccccaacaccccacagaagtgctttcttctcccaattcatcctcactcagtccagcttagttcaagtcctgcctcttaaataaacctttttggacacacaaattatcttaaaactcctgtttcacttggttcagtaccacatgggtgaacactcaatggttaactaattcttgggtgtttatcctatctctccaaccagattgtcagctccttgagggcaagagccacagtatatttccctgtttcttccacagtgcctaataatactgtggaactaggttttaataattttttaattgatgttgttatgggcaggatggcaaccagaccattgtctcagagcaggtgctggctctttcctggctactccatgttggctagcctctggtaacctcttacttattatcttcaggacactcactacagggaccagggatgatgcaacatccttgtctttttatgacaggatgtttgctcagcttctccaacaataagaagcacgtggtaaaacacttgcggatattctggactgtttttaaaaaatatacagtttaccgaaaatcatataatcttacaatgaaaaggactttatagatcagccagtgaccaaccttttcccaaccatacaaaaattccttttcccgaaggaaaagggctttctcaataagcctcagctttctaagatctaacaagatagccaccgagatccttatcgaaactcattttaggcaaatatgagttttattgtccgtttacttgtttcagagtttgtattgtgattatcaattaccacaccatctcccatgaagaaagggaacggtgaagtactaagcgctagaggaagcagccaagtcggttagtggaagcatgattggtgcccagttagcctctgcaggatgtggaaacctccttccaggggaggttcagtgaattgtgtaggagaggttgtctgtggccagaatttaaacctatactcactttcccaaattgaatcactgctcacactgctgatgatttagagtgctgtccggtggagatcccacccgaacgtcttatctaatcatgaaactccctagttccttcatgtaacttccctgaaaaatctaagtgtttcataaatttgagagtctgtgacccacttaccttgcatctcacaggtagacagtatataactaacaaccaaagactacatattgtcactgacacacacgttataatcatttatcatatatatacatacatgcatacactctcaaagcaaataatttttcacttcaaaacagtattgacttgtataccttgtaatttgaaatattttctttgttaaaatagaatggtatcaataaatagaccattaatcag

SEQ ID NO: 175 - DNA, 15000 bp, Homo sapiens
ctgagatcacaccactgcattaccagcctgggcgacagagcaagactctgtctcaaaaacaaaatacacacacaacaatataatagtatttgtttgtttgtttgtttttgagatgcctcggattacagtgcggggattacagacgtgagccatcaagcccggacaatattattatattgttcattgcactcccacaacacccctaaggggcaggaacttttcttcccagccccctccccccgaccccaccgagagacagggtctcgctctgtcgcccaggcctggagtgcattggcgcgatcaaagctcactacagctcagaccctctggcctcaagcgatcctccagcctgggcctcccaaagcgctaggattacaggcgtgggccaccgcgcctgaccagtcttctcttcttgcagctgagccttaagagcctgtccaaagagcagaggtgggctgaaggcacaaagcgaatgaaagaataggcccccgggcaccgttgcacgccccacctcctcccaggggcgttgcactccagcccctcccgcacatgcgcactgggccttccaccgccccccgcccccagcaaagccccccgctcggagcatgcgcgggccgcttggcgccaattgctgaccgccacagccacagccagggctagcctcgccggttcccgggtggcgcgcgttcgctgcctcctcagctccaggatgatcggccagaagacgctctactcctttttctcccccagccccgccaggaagcgacacgcccccagccccgagccggccgtccaggggaccggcgtggctggggtgcctgaggaaagcggagatgcggcggtgaggcgcggcttgggccggggctagggggtgaagggggaggaaggcggtgggccccgcctgacggagggcgtgcaggatcgcgcctctgactcggtaaacccgggctccgctttccaaatagcctccacgtgttcaaaatagccgccgctgtcccccatgggccgccatgctaaagggccagccaatgggaacgcgtctcggggcccatggcgccaatccgcgcgccgcaggccctcctggctcggtgcgctgtccaatcagaggggagagggggcgggacccagagggaggttttttgccgcgaaaagaccacgtggggacgcggtggggcgggtctggcgggggcggggcacctctgtgcagggttcccagtcaccgcgacgctcctcgggaagccatagggcgcctcccagcccgtctccccgctccagtttagaacctaattcccaattcccggaccgggcccagccctgggctcttactgtccgcttttgctgggacctgttccacaaatgggcgtcttctgccttgggccgtgggggttgggccggaagctgcggacgcctgggaaggggccgctgcagctcttgagccgcctctgcggggaccacttgcaggccatcccagccaagaaggccccggctgggcaggaggagcctgggacgccgccctcctcgccgctgagtgccgagcagttggaccggatccagaggaacaaggccgcggccctgctcagactcgcggcccgcaacgtgcccgtgggctttggagagagctggaagaagcacctcagcggggagttcgggaaaccgtattttatcaaggtaaatatggaaatgcaccttccataagggtaaatgtggaggctgccggcccttttgtcttgttagtgtagccggccaagttcatgtttccgtaggcttaggttgtacccccttcaacctcctttactcacaaagggggtaaaagaaagccatgatgtttcactctgcagctttatattggttaaagttgttaacgacccgcgagatgatatcatggattcatttaagtcacatagtctattgtccaggaaaggctggcgtagtaaaatcaccaaccatcctgaatgaaacctggcttgagctttaaaaagccgagaggagtggcactgtcaggacccagcccagagaaagaggcaaggaattgacctgattgaaccacttaggtgggggggcaggcactgtttttgtttgttgttttttaaaagaatttggacataacatgacaaagaactaatgatgttccaaataacttgcactagaagctttctaattgaattcttatggtttccaatgagcaatctgattttaagtctagtttatctttaaatcagctaatgggatttgttgcagaagaaagaaagcattacactgtttatccacccccacaccaagtcttcacctggacccagatgtgtgacataaaagatgtaagtacaacttgttgataatttttattggggagaaggagtcaaatagtatttttaaattagggacactggagttaagccacagtccatcattcagtagtaaataaaacactgaaatcccgaggtttggctgactgtatttcagcctgtatttactctttttaatgtttaccacgtggtatttatgtggcaaaaaggaaaactatgtacatcctgtgctcttatttcttgtattttttttaaatcctgaaactaacctcccgcggtgtcagatgttatggtggtggtgaagttcaaactgacacacaaagcagtaaatcttttgcagcttgttatagtcaaccccaccttgacctgaccacactgccttatagttagcactttcaagctcttgacttctggcctgaacagttttgtggttctgttatcagatccctttgctttagtttgtcttatataacagttgctggttgtcggctctcatccatcttgtgttcagaagttcgtggggctgggcacggtggctcatgcctgtaatcccagcactttcggaggccaaagtgggaggatcatttgaggtcaggagttcaagaccaatgaaacctggtctctcctaaaatacaaaaattagccgggcatggtggcgcacgcctgtaattccagctacttgggaggctgaggtgggagaatcgcatgagcccaggaggcggaggttgcagtgagctgagatcacaccacttcactccagcgtgggcgacagagccagaccctgtctcaaaacaaaaaaaaaaccgtggcttctcactgttgaactatgaaagcagagcaaccctctttaaatagggccacgtcctacctctcagccttacctccacctcccactctcccactccagagttggacagtgtggcaaacccctccccacttctgtctcttaaaaatcaagtagatgcctctgtggcacctccttgaattgaagtccgttgcctgccacctctgtgatccagttttcctctgagctgctacgatgcatttagcacctgctgacactggacttttaggtttcttacccgttttcctcccccgttttgtaaactggggcaagaatcttgtgatttaatgaatatctgtgaaatgacatagaagtgaaataggtgaataaatcatcttgataaggcagccacacctaatacttagaaaatctcgtaagcttaattttagagtaagaatttagaatctagctctttggttttgaagctaaattaaatcctattaagatcaatactaatttgcttcttgtttgaatgccctattctgaataccagtaatcagtataaacagggaatattaaaaggaatattgtgagggaatgctcaaaaaccagtttcaaacctatgaggatcagatgggccagcagggcttcttgacagaccagcattgggagagttgtttcacaagagaatatgttggcatggtgtgaacaccaaggggagggacaagaggtccccaaaagcctcctggtcatggaacatctggagctggattctgaaagatagagtatgtcagctgtggaggaagattctaagaacgcaatggcagaagcttgagaatgaagactaggtgggtgggccctggatgggaaggacgaggcggcctatgtttcaacacctcccgtgacaggaacttcatttcatttcattgtctcttgccacctactcccatggcccttttgatctgacctcattctcttctggctccacctgttagaggatataggggagcagacaccctcatatgctgctggtgggaaatctgaattgcttttttttttttttttttttttttgagatggagtgcagtggtgcaatctcggcttactgcaacctccaccccctgggttcaagcgattctcctgcctcagcctcccgagtagctgggactacaggtgtgcgccaccacacccagctaatttttgtttttttagtagagatggggtttcaccatgttggccagatggtttcgatatcttgacctcgtgatctgcctacctcgccctcccaaagtgctgggattacaggcgtgagccaccatgccaggccctaaattgctttaattcatcgaaaagtaactgggggctaggcacagtggctcatgcctgtaatcccagcattttgggaggccgaggagggaggatcccttgatctcaggaatttgagaccagcctcagcaacataagggaggccgtgtgtctacaaaaagtaaaaaaaaaattaggtgggcatagtggtgcactcctgtgggcccagctactctggaggctcaggtgggaggaccacttgagcccaggagggcgaggctgccatgagctgtgatggcaccactgcacatcagcctgagcaacacagcaaacccgtgtctcaaaaaattaaaaaagcagctaggtacatatctttacaagtttaaaatacgcttagcctttgaccagcaactctgttattagcaatctatgccatagaagtgttttatttgttttgtttatgtttgtttgaggcagggtctgtgctgcttacattacagtattgtttaattcctgacccctggtggttcacaggtgaaggttgtcatcctgggacaggatccatatcatggacctaatcaagctcacgggctctgctttagtgttcaaaggcctgttccgcctccgcccaggtacagttgctttacaggtgactgcagtccagacatgattcctttcagatgtgtacttagcttattacaagtgggactatctggggcactgttcactagccttggaggaggatttctcggcctcagcaccattgacatttggggctgagtcattctttgttgtggaggaggagaggagtcctgtgctattgcaggatcttgtgccacatccctggcctctaccactggaaaccaggagcaacccccagctcgtgataatgaaaaatgtgcagacattgccaaaagtcccttgggggcgtaaaatcacccctggttaagaaccactgctttgggccgggcgcggtgactcacgcctgtaatcccagcactttgggaggctgaggcaggagaatcgctggatcccgggaggcggaggtggcagtgagccgagatcctgctactgcactctagcctgggtgacacagcaagactggaaaaaaaaaaaaaagaaccactgcttttggaggatttggtgtatgatatacataaatatgctaaggacagaaaactgtccctgagcaacagtgggggtctgggttgtaactgctgggttgatttacttaggttttccagagtgctgttaaatccaagtacagactaaagtaaaggtctttggcagagtcacctgttagaaggaggactggcagtgttgatctcattaatcggcgccatatgtgccagtgtcccttccaagggctggctgtaacttctaaccttttcacatatgtcttagacgttactgagctttcaaaattatgcttaagattctgttttttgtttttcttgtggcttgctttcagtttggagaacatttataaagagttgtctacagacatagaggattttgttcatcctggccatggagatttatctgggtgggccaagcaaggtaagccagcgactgctagattttttttttttttttttttgagaccgagtctcactctgttgcccaggctagagtgcagtggtgcaatctcagcttactgcaacctctgcctcccaggttcaggcgattctcatgcctcagcctcctgagtagctgggaccacaggcatgagccaccatagctggctaattttttaatgtatttttagtagagacagggtttcaccatgttggccaggctggtctcgaactcctgacctcaggtgatccgcccgactcggcttcccaaagtgctgggattacaggcataagccaccacgcccagccccgactccattgttgatggtagtggctgctgccattatgccggctgcagcagggaagcacagcttgctacactggatcccatcaagcattggtttcatcatggatttagcccctgttgctgggtattgggctgatttgcctgagcctacatttaacctgtttctctcatgtgtataggtgttctccttctcaacgctgtcctcacggttcgtgcccatcaagccaactctcataaggagcgaggctgggagcagttcactgatgcagttgtgtcctggctaaatcagaactcgaatggccttgttttcttgctctggggctcttatgctcagaagaagggcagtgccattgatagggtatgttttgttttctttcttttttttcttttttttttaacactataaaaacaatgtaaagaattctaggagtccctgctgtgtttggtcctggaaaatccatgttataaaataacttttattttcccttaggcctgttataagggtttcccattgaaaactgagaagaatttggacaaattataggggtgatgagttgtgtatgaggaaagcaaagcaactggccaacttgtgactgaatgcagttggtgctgtaggcatgaacttggtgtctacaagatacaagtccctgggtaccattcacttaacaagtgatggatgaggcatgtttctggcttccaagaaatttggggacatatagaaaacacaaagaattccactcaatcacaaatttaacttgcccatgaaaatactatcagtgatcattattgtttggtttctgggttttttgttttttgatggagtctcgctctgttgcccaggctgtagtgcagtggtatgatttgggctcactgcaacctccgcctgctgggtttaagtgattctgcctcagcctcccgagtagctgggactacaggcgcccgccaccacacccggctgatttttttttattttttagtagagacagggtttcaccatgttggccaggctggttttgaactcctgacctcaagcgatctgtcctcctcaacctccaaagtgctaggattacaggcatgagccaccacacccggcctatcggtgatcattattaaccccaaggtctaattgcagatacccaacacgaccaaaccagtggctcccctccctacatcttccccctatctgctacctccctctttcccttcactcactgaagcacttctacacctggttgtggaaatcagagacctaaaagtcatccttgaatcctccatcccatcagtaaatcccatcaactctgcctcccaaaacaccccagtctactgcttctcattcgccactgctgcccttcaggcatgagtcaccatcatctttctccaggagaaccgtgatggactagagatggaggcttgatggagagccgcagagtggaggagggagagatagggggtgggaaggagacgagccaggggtgtgttcatccctggcaaatgggagagacattgggtgggggagaaattatagagtaaatgcttcaatgatcgaaggcaagggcttagcagaggtaacctgacaatagtttttggtgtatcagcaggaggtaacgggggtatcagaaatgtgcacgtatatttacccctaccttgtgtgggtactaggttgagcacttttgttttttgagatggagtctttctgtcacccaggctggagtgcagtggcatgatctcggctcactgcaacttcgcctcctgggttcaagcacttctcctgcctcagcctcctgagtagctaggattacagttgcctgccaccacacccagctaatattttttatttttagtagagactgggtttcaccatgttgacaaggctggtcttgaactcctgacctcaagcgatcctcccatcttggtctcccaaagtgctaggattacagatgtaagccaccgcacccgaccaggttgagtactttgcatgcagaatcttacttaactctcagaaaggctttgaggtaggcatacacttgtatgagtgacctaagatctgactggtatgaactgctaagatgtgatcatctaggtatgtaagaagtgtgcgtgagagtaattgctaatctctatcccttagggaggtttacggccagtgttgctcttccgcagtatattggtaatctttaatcatggtttggtctgaaagtaaacagttgttaaagtagcttggtcattaaagccaaattgcatatctccagcccagtgtctcttctgatctgtgccttgttactactgccccatgaacatgccaaattcaacattttccaaacgaagtttctccttttctcatccatgcttcactaaacttcctcctctgcactccctagcagcaaaaagcaccatcatctgcccagttgtccagccagatctattactgacacctgcctacctctctttctcccctcttctgtcctttttttccaccttcccagtcagtcagtcattcatatctgtgttctttcttccccctccaaatctacccctgcctgaccacctttgccttcattcaggccctcacctgatcttgcctggagggttctgatgctttctccctggaaggccttgccttaggctgaagatctgatttcaggggggtaggggggttggcccccaatcggcctcccagacttaactctatccctctttgcactccgatccctaggctgacccattcccctttactttttcacggtgccccacttccctgcctttgcatatcctgctttctctgcctacagtgtagaggtcattttcttctgggattctttagagctctgcagggctgacatttacaggggcctgtgctgcttgcgtgtgtgttcagcatttggtgtgcatgacttcttatcacactcagcccctgtgatcctcatttgattggtcacagtaacttcataagctgggcggtattgttattcccagtctacagatgaaaactgaagcagcttagagttgcagcaacttctctgtggtacagctactgagggtagaggtaggcctcgaccccgggcagtctggctccaggctctgtactcttaaccacactggattgcctggctttagtccccctcatcgcccctcctggactgagccccttgaaggcaagagtgttttgagaaacagtgatttgttcgttagtttttatatacagaaaagaagaggaaaacaaaaatggtctatatctccctgttaaaataactatagttgatattttaaaaaaatcaaagtagtcatttgccacataatgatgtttcagtcataaactgtatatatgacgatggtcccataagattataatattctggccgggtgtggtggctcatacctgttatcccagcactttgggtggccgaggcgagtggattgtctgagctcaggagtttgagaccagcctgggcaacatagtgaaaccctgtctctactaaaatacaaaaaattagccaggtgtggcggcgtgtgcctgtagtccagctacttgggaggcagaggttgcagttagctgagatcatgcgactgcactccagcctggcaacagagtgagactctatctcaaaaaaaaaacatatatatatatacacatatatatatacgtatatatatatacacatatatatatacgtatatatatatatgtgtatatatatatatacgtatatatatatgtgtatatatatatacgtatatatatgtgtatatatatatgttttttttttgagatagatatatgtatatatatatatacgtatatatatatgtgtatatatatatacgtatatatatgtatatatatgtgtatatatatatgtatatatatgtgtatatatatatatacgtatatatatatgtgtatatatatatatataaaaaatatttttactgcatcttttctatgtttagatacacaaatgcctaccattgtgtcacagttgcctatagtatttagtacagtaacatgctacacaggtttgtagaccaggagcaataagctacactatatagcctaggtgtgtagtggtaggttatcccatttgggtttgtgtaaagatgccctgtggtgtacggatagcagtgaaattgcctaacaacacacttctcagaatgcatccctgtcattaggtgatgtatgactattgctttttttcttttgaaacagggtctagctctgtcacccaggctggaatgcactggcttgatctcaactcactgcggcctcaacctcccaggctcaagcaatcctcccaccttagtcacctgagtagcagggaccacaggcgtgcgccaccacacctggctaatttttgtatttttttttgtggagacagggtttcaccacgttgcccaggctggctcttgaactcctggacttaaacgatcctcctgcctcggcctcccaaagtgctgggattacaggcgtgagctaccacacctggccactgactattcctcttttttttttttttttttttttttctgagacagtttcactcttgttgcccaggctggagtgcaatggcgtgatctcagttcactgcagcctccccctcctgggttcaagtgattctcctgcctcagcctcctgagtagctgggattacaggcatgtaccaccacatccagctaattttgtatttttagtagagacggagtttcttcatgttggtcaggctggtcttgaactcctgacctcaggtgatccacctacctcagcctcccaaagtgctgggattacaggtgtgagccaccacgcccggccaactattccatttttgtggcgagatttttttgtttttgtttttgttttttaattcttccttcttaggagctgtaagactattcagagagttcagaaaggcacaaaatggaaagtaaatggcttccactctttctcttaaaggaactactaaatacagtgtcttgggtatttttctaaagtttttaaaaaatgaaattattttgcattttgttcacttggtaaattttggaggtcatctcatcagtatatttatctttcgcatgtttttctaggagttatgtggttttacattgtaagaactttagaaaaatacatttagccagttctgtaacactgaattgtatactaggttttagctgacataagcagtgtgtcagtccctttatatgtacctatttgtgtaggtacaactggtccctggcttatgaagtttgacctgatttttttcgactttacaatggtgtataaccatactttgagcactcacacgttgtttttttttctttctttaagagacagggtctcttggctgggagcagtggctcacgcctgtaatcccaacactttgagaggccagggtggcggatcacttgagctcaggggtttgagaacagcctgggcaacatagtgagaccttgtctctaaaaaacacaaaaaattagcctggtgtagtggcacgcacctgtggtcccaggtactcaggaggctgaggtgggagagtaacttgagcctaggaggtggaggctacagtgggccacagtcatgccactacactctagcctgggtgacagagtaagaccccatctcaaaaaataaaaaattaaaaaaaaagatcttgctctgtcacccaggctggagtgcagtggcacaattatagctttttgcagcctcgaactcctgggctcaagtgatcctgccacctcagtcttctgtgtagctaggactgcaggtgcatgccatcacacttggctaactttttaatttttttgtagagatggggtctcgctatgttgcctcagttggttgtaaactcttggtcccatgcagttgtcctaccttggcctcccaaagcactgggattacaggtgtaagccaccgtgactggccccgttctatttttcactttcagtacagtgttcaatgagttacatgaggtactaaacacttcattgtaaaagaagctttgttttgcccagctgtaggctaatgtaggtgttctgagcatgtttaaggtagggtaggttaagctatgatgttcagcaggttatatgtcataaatatatcttcaacttaggatattttctacttaggatgggttttccaagatgttaaccccatccattgtgttaataagttgaggagtttatctgtgtgtgtatgcatcatggtgtcctttagcaaatacagtcttagcagtggaaattgctggcagtatgatagggacacttgaaaattgcatagataattgccaacttgaaggcagagggtggtgctctttgcatctcagagcctagcaaaggtaggtagttgctcaacaaacggactaatgttctaatgcaaatgctgaatgctccactttggaagggggagaatttagagggcaaaggggaatcgcacagggtcttaaagtgcaacagccacagtccttcctttttggggaaaaaaaaaaaaagtcccggccgggcatggtggttcacgcctgtaatcccagcactttggggaggccaaggcgagcggatcacgaggtcaagagatcgagaccatcctggccaatatgatgaaaccccatctctactaaaaatacaaaaattagctgggtgtggtggcacgcgcctgtagtcccagctacttgggaagctgaggcaggagaatcgcttgaacccgggaggcggaggttgcagtgagtcgagatcacgccactgcagcaagactctgtctcaaaaaaaaaaaaaaaaaatttaaaaagtcccaaatctgccaccatttattcttgatctttttcagaagcggcaccatgtactacagacggctcatccctcccctttgtcagtgtatagagggttctttggatgtagacacttttcaaagaccaatgagctgctgcagaagtctggcaagaagcccattgactggaaggagctgtgatcatcagctgaggggtggcctttgagaagctgctgttaacgtatttgccagttacgaagttccactgaaaattttcctattaattcttaagtactctgcataagggggaaaagcttccagaaagcagccatgaaccaggctgtccaggaatggcagctgtatccaaccacaaacaacaaaggctaccctttgaccaaatgtctttctctgcaacatggcttcggcctaaaatatgcagaagacagatgaggtcaaatactcagttggctctctttatctcccttgcctttatggtgaaacaggggagatgtgcacctttcaggcacagccctagtttggcgcctgctgctccttggttttgcctggttagactttcagtgacagatgttggggtgtttttgcttagaaaggtccccttgtctcagccttgcagggcaggcatgccagtctctgccagttccactgcccccttgatctttgaaggagtcctcaggcccctcgcagcataaggatgttttgcaactttccagaatctggcccagaaattagggctcaatttcctgattgtagtagaggttaagattgctgtgagctttatcagataagagaccgagagaagtaagctgggtcttgttattccttgggtgttggtggaataagcagtggaatttgaacaaggaagaggagaaaagggaattttgtctttatggggtggggtgattttctcctagggttatgtccagttggggtttttaaggcagcacagactgccaagtactgttttttttaaccgactgaaatcactttgggatattttttcctgcaacactggaaagttttagttttttaagaagtactcatgcagatatatatatatatatttttcccagtcctttttttaagagacggtctttattgggtctgcacctccatccttgatcttgttagcaatgctgtttttgctgttagtcgggttagagttggctctacgcgtaggtttgttaataaaagtttgttaaaagtttgttttgtgcaagtgtcctttgtgcgtccaggccagggcatccatggacgtccttgggctgccctttcccttggcgcctcccagggttcccatagcaaccaccgtctgcaggaggggccgcccttgcccctcctccccgccctgccgctcagtggaacggcccaaccctcccctggctgcggtgagcgctgggcccaacccccggcctggagcagcgccccaactccgagcaccgtggagcaccggctgccagctgagaccccagaggggtaactaacggcctgaggaaggcatttcttcggggaaacatggcgtgcccgtcgtggctacgttctgccaagccctgtgacgttggaggggagccgcctgcatcccccgctcagccagtgtttctagatccgagacatctggaactcggaagtgaggccagggctccaggaagactccctgatgacgcactggcccgcagcccaggctcaggtagtgggggctgtcaggatgatctgtgggatcccccagtgtccgaagaaagaagccacaattgtgtttttttttctttctttctttttctttttttttttttgagcgagtctcactctgtcgctcaggctgaagtacagtggcgcgatctcggctcactgcaacctctgcctccaggggtcaagcaatcctcccacctcagcctcccaagtagctgggattacgagcatgcactaccacgcccggctaatttttgtacttttagtatagaa

SEQ ID NO: 176 - DNA, 599 bp, Homo sapiens
cgggacgcggatgcagacgcaggcggaggcgctgacggcggggatggccggggtggccacagctgccgcgggggcgtggacacagccgcagctccggccggtggagctcccccagcgcacgcgccaggtccgggcagagacgccgcgtctgccgcagggggtcacgaatgcggccgcacatattcaccctcagcgtgcctttcccgacccccttggaggcggaaatcgcccatgggtccctggcaccagatgccgagccccaccaaagggtggttgggaaggatctcacagtgagtggcaggatcctggtcgtccgctggaaagctgaagactgtcgcctgctccgaatttccgtcatcaactttcttgaccagctttccctggtggtgcggaccatgcagcgctttgggccccccgtttcccgctaagcctggcctgggcaaatggagcgaggtcccactttgcgtctccttgtaggcagtgcgtccatccttccctagggcaggaattcccacagttgctactttcctgggagggcctcatgttttatctggttcttaaatgtttgttactacagaaaataaaactgaggtattatt

SEQ ID NO: 177 - DNA, 2457 bp, Homo sapiens
cgctgttgcctccgccacctcctccgccgccgcgcgcccctcggagttccgcgccccaccatgcccaacatcgtgctgttcagcggcagctcgcatcaggacctatcccagcgcgtggccgaccgcctgggcctggagctgggcaaggtggtcacgaagaagttcagcaaccaggagaccagcgtggagattggtgaaagcgtgagaggggaagatgtctacatcatccagagcggctgcggggaaattaacgacaacctgatggaactcctcatcatgatcaatgcctgcaagattgcgtcatcatccagagtaactgccgtgatcccgtgtttcccatacgcccgacaagataaaaaggacaagagtcgtgccccaatttctgcaaaacttgtggccaatatgctgtcggtggctggggcggatcacatcatcaccatggacctgcatgcttctcagatacagggattctttgatattcctgtggataatttgtatgcggagcccgcagtcctgcagtggattcgggaaaacattgccgagtggaagaactgtatcattgtttcacctgacgcagggggagccaaaagggttacatcaattgcagacaggttgaatgtggaatttgctttgatccacaaagagaggaagaaggcgaatgaagtggaccggatggtcctggtgggcgacgtgaaggaccgtgtggccatcctcgtggatgacatggctgacacttgcggcaccatctgccatgctgcggacaagctgctgtcagctggagccaccaaagtgtatgctatccttacccatgggatcttctctggaccagctatttccagaataaataatgccgcctttgaggctgttgtcgtcacaaacacaattccgcaagaggacaaaatgaaacactgcaccaagattcaggtcattgacatttccatgatcttggccgaagcaatccgaaggacacacaatggggaatccgtgtcctacctgttcagccatgtcccgctataaatccagaatgggaagtgtccagcaagcctactctgacttctgacttgtttttgttttctggatttttagctgtaggtattcagcaatgataggttaatcactggcaaaagcatcagatctttgtatatgctaagatttattgtttccccttctaaagctcaagatcatttctttccagtttttggggaaatggtggtggttatttggtctttaagtgaactgtcttaaatgagaaacgtttttgtcattttgacttttaacaggtacaggtgatctcttcctttgttctttcagtactttgaggcgacaactttcaagtatataatttcattgtggaagtcatagtttatatatttcgaggttgccaaaggtgacttcacattaaagccttctgtgtaaatatatactgataatgcctatggacatttgggtaaaaccctgtatagaattaattatccttttactttggagtgaaccttggaaaatttataattataataccatggattttgaattttccttttttttttttttttttggataactcagtttcagataaaccatcttggttactgtgcttaatttggaccaaattttatttagcttaatatggacactgacacattttggggggtatacattagacatatcagagcagtgtatttctggatcattttttaaatgacctcttctaaaacataactgtcacttacctgaaatgctgcatcctaaaattccaaaattatattgagcaatcgccaaggcctaaagccaactgacttaaaggtaatcatttcagctaagattaaatttaaagcctaagaatgtatagagctagttttaaaataatgatctcagatttttaaaaaggatataggaacctgcattgtcattctctgaattaagaactgatggtttctatcattatttagccccacctttgtattttaaaatccttcagaatacatttatgaaccaatgcgactggacttagccacacacaatggaaattcagaccttgactatttggtgtttccagttcacaaaggtgatgaagactgtcttgggagcagcttaatcccaaaatttgtacatttcttgctgctcctggcgtggaaacttaagtgagaccaccaaatacattggtcctgtccaattctactgaatgggggtggacctggcatttatctggccaaaaacaggagccagagaaatatgaatataccaaagttgtttgtttagcctccaacttaaattacattagtcaacttatagatactcatatgatcacttttctttttagatactacatcaactagattcaggagtatatcatttgcagtgcttgtattggtttaaaatgtaagattttaagatcctctaacactgtactaaaacatttcaataaaatcattctgactgcgttcaaaaaaaaaaaaa

SEQ ID NO: 178 - DNA, 1882 bp, Homo sapiens
gggcaggaagacggcgctgcccggaggagcggggcgggcgggcgcgcgggggagcgggcggcgggcgggagccaggcccgggcgggggcgggggcggcggggccagaagaggcggcgggccgcgctccggccggtctgcggcgttggccttggctttggctttggcggcggcggtggagaagatgctgcagtccctggccggcagctcgtgcgtgcgcctggtggagcggcaccgctcggcctggtgcttcggcttcctggtgctgggctacttgctctacctggtcttcggcgcagtggtcttctcctcggtggagctgccctatgaggacctgctgcgccaggagctgcgcaagctgaagcgacgcttcttggaggagcacgagtgcctgtctgagcagcagctggagcagttcctgggccgggtgctggaggccagcaactacggcgtgtcggtgctcagcaacgcctcgggcaactggaactgggacttcacctccgcgctcttcttcgccagcaccgtgctctccaccacaggttatggccacaccgtgcccttgtcagatggaggtaaggccttctgcatcatctactccgtcattggcattcccttcaccctcctgttcctgacggctgtggtccagcgcatcaccgtgcacgtcacccgcaggccggtcctctacttccacatccgctggggcttctccaagcaggtggtggccatcgtccatgccgtgctccttgggtttgtcactgtgtcctgcttcttcttcatcccggccgctgtcttctcagtcctggaggatgactggaacttcctggaatccttttatttttgttttatttccctgagcaccattggcctgggggattatgtgcctggggaaggctacaatcaaaaattcagagagctctataagattgggatcacgtgttacctgctacttggccttattgccatgttggtagttctggaaaccttctgtgaactccatgagctgaaaaaattcagaaaaatgttctatgtgaagaaggacaaggacgaggatcaggtgcacatcatagagcatgaccaactgtccttctcctcgatcacagaccaggcagctggcatgaaagaggaccagaagcaaaatgagccttttgtggccacccagtcatctgcctgcgtggatggccctgcaaaccattgagcgtaggatttgttgcattatgctagagcaccagggtcagggtgcaaggaagaggcttaagtatgttcatttttatcagaatgcaaaagcgaaaattatgtcactttaagaaatagctactgtttgcaatgtcttattaaaaaacaacaaaaaaagacacatggaacaaagaagctgtgaccccagcaggatgtctaatatgtgaggaaatgagatgtccacctaaaattcatatgtgacaaaattatctcgaccttacataggaggagaatacttgaagcagtatgctgctgtggttagaagcagattttatacttttaactggaaactttggggtttgcatttagatcatttagctgatggctaaatagcaaaatttatatttagaagcaaaaaaaaaaagcatagagatgtgttttataaataggtttatgtgtactggtttgcatgtacccacccaaaatgattatttttggagaatctaagtcaaactcactatttataatgcataggtaaccattaactatgtacatataaagtataaatatgtttatattctgtacatatggtttaggtcaccagatcctagtgtagttctgaaactaagactatagatattttgtttcttttgatttctctttatactaaagaatccagagttgctacaataaaataaggggaataataaa

SEQ ID NO: 179 - DNA, 2969 bp, Homo sapiens
ctaaattacccactacgttgcttgtatatttaaagttggagttcgttgctaaagatggcagacccagatgtcctcactgaagttccagcagcattgaagcggttagccaagtatgtgatccggggattttatggcattgagcatgccttggccttggacatcttgatcaggaactcctgtgtgaaagaggaggatatgctggagctgctcaagtttgatcggaagcaacttcgatcagttttgaataatttaaagggagacaagtttatcaaatgcagaatgagggtagagactgctgcagacgggaaaaccactcgccataactactacttcatcaattatcgtactcttgttaatgtggtaaaatataaactggaccacatgagaagaagaattgagaccgatgagagagattcgaccaaccgggcttccttcaaatgtcctgtctgtagtagtactttcacagacttagaagctaatcagctctttgatcctatgacaggaactttccgctgtactttttgccatacagaggtagaagaggatgaatcagcaatgcccaaaaaagatgcacgcacacttttggcaaggtttaatgaacaaattgagcccatttatgcattgcttcgggagacagaggatgtgaacttggcctatgaaatacttgagccagaacccacagaaatcccagccctgaaacagagcaaggaccatgcagcaactactgctggagctgctagcctagcaggtgggcaccaccgggaagcatgggccaccaaaggtccttcctatgaagacttatacactcagaatgttgtcattaacatggatgaccaagaagatcttcatcgagcctcactggaagggaaatctgccaaagagaggcctatttggttgagagaaagcactgtccaaggggcatatggttctgaagatatgaaagaagggggcatagatatggacgcatttcaggagcgtgaggaaggccatgctgggcctgatgacaacgaagaggtcatgcgagcactgctcattcacgagaaaaagacttcctctgccatggctggttcagtgggggcagctgctccagtgaccgctgccaatggcgatgactcagaaagcgagaccagtgagtcagatgatgattctccaccccgtccggcagctgtggctgtgcataaacgagaagaggatgaagaggaagatgacgagtttgaagaagtagcagatgaccccattgtcatggtggctggccgtccgttctcctacagtgaagtgagccaacggccagagctagtggcccagatgacaccagaagaaaaggaagcatatatagcaatgggacaacgcatgtttgaggacctctttgagtgagctttccctaattctttctcctttctctaatgctcagttcaaaaaggaatgtctcatctttgaagaaaagtatttaagtggctttctgcccctcttgatgtaagcaactgtccatccttgtgcaaagattgatggtagagagcttgacttttatgccagaaactttcccagcaaggtagggtgctgagaatcctacccttccttgctgtcactacagtattaatattttactgtattttcttttcttttttttttttttttggagatgaagtctcactcttgtaccccaggctggagtgcaatggcgtgatctcggctcactgcaacctctgcctcctgggttcaagcgattctcctgcctcagcctcccgagtagctgggattacaggtgcctgccaccatgcctggctaatttttgtatttttagtagaggcagggtttcaccatgttagccaggatgatctcgatctcctgacctcatgatccacccgcctcggcctcccaaagtgctgtattttcttatctgatttttttcttgccttattaagacataattttctcccttctgaaatgagtgagggaagttcataaggtaaatccttcccatccatctgtttactacaataggttacaataattcactgatcacatccattttatctgttctagccaggcattccaaacaatttcttatactgctgcccaccaaagcagcttgccaacagtcaaatcactgattgggggaaaaaatcctgaaattttgcttagaatttgagcatttcctcaaaattgagatggatcaatatgtaaggggaggtgggagcgtgtgtggaagggggagagatatacttgagtcttatgattaatgtctaaaccagaatttgtgtctttagaactgaccagactggtagattttattgtattgcttaatgtcttttggtttggatttaggatgatagaaaacagaagtataattggtaaacccttaggaagaaattagaaaaacatggacgtaagacaaaaagtctctgtgaagggttgaagagtgacaagcattggtaacagtgccttagaactgtgtcagttagtctgatttggaaatcctttatgtaaagctgagactggtcctggttttgttccctttggtacagacctcttgtcagtgctataaattgtttaatgaggccattccagcagaaatcaacagaataattgattactcttctctctctctgtcactctccctctttctaaacatcattgaaggctgtctctctttaattttgtcagacacagtattttagggtgcatccagtataccattgagcattgtaacctcaggaaacagtttattttgggttctgatatgtagcatggtattttccctaaggcagaactttaaaaataaagaactttcacacaagggtctgtaacaattgtatatcttacaatatttttccttgcattgtaatttttaagtatttatcattttatagtacacatgtaaagaatatatgagccttgtatggagtgatgtttcatttacctgggttgtgttaatgactgaatgttgacaataaatctgttttatactg

SEQ ID NO: 180 - DNA, 65608 bp, Homo sapiens
  misc_feature (1)...(65608): n=a,t,g or c
ccgcccccagccccagccccgccgggccccgccccccgtcgagtgcatgaggttgacgctactttgttgcacctggagggaagaacgtatgggagaggaaggtgcgcgggccgcggggtgtggggcgagggcctggagggggtgcccgggcagcgtggggcacgggagggggccgggtctgccaggaggccgcgccctgcctcctccgggatgagctcgtccttacgaagcccgcaggcccctccctgtccccctcccgcccgggatccccctccccggcccccggcgagctgccctcctgcgggtctgggggcccctggaccctttttcctcctcccacgtccccccgcgaaggactcccagacactgcccaccccgcgtcggcctccatccgcgtgctctgtccaccacccgggcctcgctggggccaccctttatccagtctcggaagaaagagcggctggggacacagccccgggtcccagtggccgcctgcccggctctgtgaccttgagccaggcgctgacttcctggtcctcagtttccccttctgtacatttggaaactgggtagttgcccccccggtgtcggtgattgggggccagatgggtagagcggagataggcgtccaggaagccggaggccgtgtactgcgggagcctcatccactctccctgtccgtgccccaaacccggtgcctgccctcagtcttggctgggagcatgactcatcctaacctcctctttagccccttctccctcactggggcccaaggcgcagtactgcactgcagttagggttcaaggactcccccagcctaggacagggtctgggggcccctccttggatctccttcgctgacctgtcacttagatccacctggccccaaggcagggcctgactccacacctccccctgccaccaactcttcccaggcccatgaaaacctgattggggtaggggcccaccttcctgtagcccctgcctacctaaggtacctgcgtcttcacagagggtcaggctgttgtggccttgggacctagctatgtgactgggcaagccatgccatctctggggctcagtctccccttctgtacagtggagaggggcaggtctggggcattttccagggcccaccagctccaagggtgccaggccccaaggatgactaagcatcgtgtggctggctagaggaggtgccaggcctccctgggacaggtgtctgggagtacccacgtctgcagccccttccccttgccaagccagggcattcattgccaaggatctgttagggccggcacctccaggcttcctgcccttgacctcccagctggcttcagcccaggatgcactaatccagccctgtccagtccctgcctttgaagggccctcttagtacttcttcctgggcaggagagggaagaaaggaggctgtgataggaatgtcacccactgccttatccctaaagccactgcttcctttctcctcatttaccttgccagatccaatgctatagcgggaggatggacctgatcctcctcctaagctgatacatagggaaacagggccagagaagcttggcaacctagtcagtatctcagcaagactcaggccagcgccctttcttctcctatttggcacagcgactgccctgcctgggcgctgcacatgtgcagtgtgcgaggattggtgcaggtgtaggtatatgtggggtgggcagggcaagctgggcctgcaccagatcacacttcctgagaatgcttcccaactcccttcccaccctgcaggaagcgagttgcccgtgtgtgcaagctgcggccagaggatctatgatggccagtacctccaggccctgaacgcggactggcacgcagactgcttcaggtagggtggggtgcccagggcctgtgttgccctaaacaaggcctgccagagaggacaggctggtcaaggaatgggggaggccgggatatgcctcctggtgccgtcccctattgtgacttcgtggccttaatttaccatttatgacatgaggtgttttgactagaaaatccctacaggccttcctgttgtcattttatttatctatttttttttctttttgagacggagtctcgctctgtcacccaggctggagtacagtggtgcgatcttggctcattgcaacctcttcctcctgggctcacgcagttctcctgtgtcagcctctggagtagctgggattacaggcgtgcaccaccacgcccagctaatttttgtatttttagtagagacgggttttgccatgttagccaggctggtctgaaacttctgacctcaagtgatcttcccacctcagcctcccaaagtgctgggatgacagacataaaccaccgctcctggcctcattttattttcttttatgtatttttcttttttcgaaatggtcttgctctgttgcccaggctggagtgcagtggtgccatctcggctcattgcaacctccatctcccgggctaaagtgatcctcctacttcagcctcccgagtagctgggattataggtatacaccacaatgctcagctaattttttaaattttgtgtaaagacagggtctcactattgagacccaggctggtcttgaacttgtgacctcaagcaatcctcctgccttggcctccgaaagtgctaggcttacaggcgtgagctaacgccttggcctctgttgtcatcctagatctctgagatctaaatcttagagaggatgggagagacctccaattgagccagtgcctgcaattcagccccctgctggcacccagacagggggaagagttggaaggaatgtccctcctgccttctgggtgttcatgctcttgcagggagggaagacaaaccaggccttaagggaaaccaggccaccctcagtgtcttcccaggctgcttgcgaacatgcataacccagtcacaccagccccagtgtccagacacacacccacaggtaggaagaaagtagggtcagggttgtggcggaggataaagagtacatgaggacctgaaggtcacccagtaggaccatcctgagaagccaggagcaggggtctacctgccttgagccagagcagggccagagcaggggtctcaaaggatgtgagatttcctgggtagaaaagtagagtggaggtggggcgtggtggctcacacctataatcccatcactttttggggctgaggtgggcagatcacttgagttcaggagttcgagacaagcctgggcaatatggcaacaccctgtctccactgaaaatacaaaaaattagccgggcgtggtgcgcatgcctgtagtcccagctactcaagaggctgaggtggcagggttacttgagcctgggaggtggaggctgcagtgagctatgatcgcaccactgcactctagcctgggcaatagagcgagacccagtctcaatttttaaaaaagaaagaaagaaaaacaaatggtgtgggagagaattacaggcatagtcaccaaacagcaaggttcaggggagaaaactccataaaagggtagaaggtgaagcttctgggatgcccagcaggggtcaagacatccaccactaggactttattttaggcttctgccttggtttattttttggtttttggtttttttgagacagtcttgttgtgtcgcccaggctggggagcagtggcgcgatccctcctcactgcaacctccgcctcccaggttcaagcgattctcctgcttcagcctcccaagtagctgggattacaggtgtgcaccaccacgcccggctaagttttgtattttcagtagagatagggttttgccatgttggccaggctggtctcgaactcctgacctcaagtgatctgcccgcctcagcctcccaaaatgctggaattacaggcatgagccactgcacctggcctcggtttgtttttttgtttcttcttttctttttttttacacagggtcttgctgtgtcacccaggctggcgtgcagtggtgagatcatagcccactgtagcctccagctccaactggttcaagcgatccttctgactcagcctcccaaagtgctgggattacaagcataagccaccatgcccagcctgttttttcttttttaggaataacgtctaacgttttctaacattcagtaagggacaacccctgttctaagtactttgcatagttagatattagtgctgtctttgttttgccagagagaaaattgggacacagagaggttaattctcttgatgaaagtcacacagccagtgagtgaaatgaacacactcagtgtggctgaaaggagacagacagcatgccctgggattctgcatcaggtgctcagaaagaggccttcggggggcaagagggctctcaacaggcagaggaaaccatctgcacagcggtgggatggtgcggactgctgagggaacaggaacagttcccttggaaggaacagaataagctgagggatccaacaagaaacaaagttgagaccgattcgtgaagggccttgaatgccaagataaggagtttcagaagtcaggatgggggtggtggctcatccccgtaatcccagcactttgggaggccgaggcaggcagatcacttgaccccaggagcttgagaccagcctggccaacgtggtgaaacccccgtctctactaaatattcaaaaattagccaggcatggtggcacatgactgtaatccaagctactcgggaggctaaggaaggagaatcacttgaacctgggaggcggaggctgcagtgagctgagatcacgtcactgcactccagcctgggagacagagcgagactccatctcaaaaaaaaaaaaaaaaaaaaatagaagggagtcggcagaaagccagggaggggctggggtgacatgctgttgaagaatgccatcccagtgggccggtggtggtatctaggcagggaagggactgtcccagtaactcaagggtctgagctcataggacctgacctgggacagtgactgaggatggagagaatttcaggcagaagggacagtttttggtgagtatttgtcatattggctaccatgcattgagcactcttcatgctaatttgttaaatcttcatcataactctatgagggactgtatgtgcccagtttgcatgggagaaacagagattccatgcaatcaagtgcctcgctgaaggttgtaacatctagagctgggactaaaaccttctcactccacatcgccacagagtaggaaaggcaggggctggcggtggcacatgcctataatcccagccctttgggaggcggaggcaggtggatctcttgagcccaggagtttgagaccagtgtgggcaacatagtgaaaccttgtctctacaaaaaaattagctgagcatggtggtggtgcctgtagtcccagctactcaagggcgctgacatgggagggttgcttgagcctgggaggtggaggttgcagtgagctatgatcacaccactgcaagccagcctgggtgacagagtgaaatcccatctcaaaaaaaagaaagaaaggaagaaagaaaaaggcaggggcttcggggagggcatgggcactggcgaatggcagggtggaacctgaagccatctggttttctaacctgggcactggggagttggtggtttgttgactctgatggaattgggggtcatgttggggaggagacatgctcatctgtgttgagctggaggggacatgggctatccatggtggctgtgtcctgcccagagctagccatgggagcctgagtccagttggaggtaggaaagtcagaaaaaacggccgcctcggagctggccctgagatggtgagtgggatttgtgatagggccaagacgaatgaagggaagaactttggggacccctgtgtctgcggtgaggggggagatggagccttgggtgatggagagagggtcaggagtagagccacagaagccacaggagggaagccgtgttacaggatgggtgtacctggctttggagtggcctgtcccaaatcactcaccaggagaggggtgagtccccgggtcagggcagtaaagaggaggcatgtttgtgctgtccctggtgtagtgaaactcaagaaggaagccaggtgcagtggctcacgcctgtaatcccagcactttgggaggccaaggcaggcagatcacctgaggtcgggagtttgagaccagtctggccaacatggtgaaaccccatctctactaaaaatacaaaaattagccgggcctgttggtgggcgcctgtaatcccagctactcaggaggctgaggcagaagaatcgcttgaacccgggaggcagtgattgcagtgagtcaagaatcgcgccactgcactctagcctgggtgacagagcaagactccatctcgaaaaaaaaaaagtctcaatatggggaaagatccactagaagtaagagccatggcttctacctcgtggcttgtgggtgtgatactcccaacagtccccaaagctggtggtcctcaccgcgtgacagtgagcagagcagctcagagggggtcactgctcacctgggtgcatggctgaccacagccaggctggctctcagtgggatgcccaaggtgctagactctgcttagtctccctcgggccctgggcttgaggcattgggcccggcccagacctcatttcatgcactgagacctttgttccagggcccctcacccctctgaaggtgttcgggcaggggcaatgtgataaggccatgaggggtctgcagcctccagccccactggggaggtggccagtgatttccaccttcctggcccctctgcatgcccctcccagtggaacttcctagggtccctgagtcagtcacttgcaaataattatggcgtgcccactctgcattaggcccctctcacaacaacccagtaagggggtgctatttatttattaaagcgattttttttttgagtctcgctctgtcgcccaggctggagtgcggtggcgcaatctcggcttactgcaagctctgcctcccgggttcacaccattctcctgcctcagcctcccaagtagctgggactacaggcgcccaccaccacacccggctaatttttttttgtttgtttgtatttttagtacagacgaggtttcgctgtgtgagccaggatggtctcgatctcctgacctcgtgatccgcccacctcagcctcccaaagtgctgggattacaggcgtgagccaccgtgcccggcaatattaaagcgattttaaggccaaggctggtaactcacgcctgtaatcccagcactttgggaggctgaggcaggaggactgcttgaggccaggagtttgagatcaacctaggcaacatagtgagactccatctctacaaaaaaattagccaggcgtggtggtgcgtacctgtagtcccagctactcaggaggctgagatgggaggatcatttgaacccaggatgtcgaagctgcagtgagctgtgatcacgccactgcactctggcctgggcaacagagcgagacactgtctcaaatttttaaaaagcgattttacaaatgaggtgcagagttcagtcacttgccaaaagtctcacagcgcgtgaggagtagaatcaggactcgaaccgaggcagcctggcttcagagcctacagtgtaaccacagcttagtcccacacctcccagaccaacagggtccctgccttctagtgggcaagacactcagtgaacaaatgtagtgtcaggtattgggggacagcactctcaggaagtgatgtttaagggacagaattgaagggagcagtgtttagaggatgtcgggggtagggccggtgcatgtgcaaaggccttggggtgggaatgtgcttggcacaactgaggaccacaaagccagcgtgcgggagtgcagtcagtggccaggggtgcatagagccttgtgggccccgtggaaggtgccgttggctgtacactttttttttttttttttttttttttttttgagacagagtctcgcttttgttgcccaggctggagtgcagtggcgtgatctcagctcactgcaacctccgcctcccgggttcaagcgattctcctgcctcagcttcctggtagctgggactacaggcgcccaccaccacacctggctaatttttgtgtttttaatagagacggggtttcaccatgttagccaggctggcctcaaactcctgacctcaagcgatctgtctacctcagcctcccaaagtgctggggttacaggcatgagccactgcgcacaggcagctgtgcatctttgaatgtcataacctgagcatctgagagctgctcctgtcccctggcccctgctcttgaggaagtcccacgctgataggacagacagggtcataagtgctgtgatgggggcctgcaggctgctggagggctcagccgggaccagatgctgcccctctttgtagagtgggacaattgctgcaggcccatgggacctctggtattagccctgagggttgtcactccggggcctgcccctttctgtgttctgacctcccagccccttgcaggccccgcctcccggaaggttatgaccaggcttggactggtccaggcttccctttggctcacatactgcctctgcgaggtcccctccaggaagcctcctgtgcacaacccccagggctgccgcatccctggtagcatctccttggcagctgggtgggctggccctgggcaaggagggctgagcatgctgctggcctgtggggttggagcagcggcgggatgcaacctccctttcttcaggggacctttttggcgaagacaaactgtccataggaagtcgacctctgttcccttgggggcagcagtggaagaggcagctgcttttgagcttgtccctgtccccagagaagcctgaggccttcagtgccgttgccagggccgaggctgaggagcctacagcgtgtgttcaggactgagggccagggacgggcacaggctccctgcctggggtccaagcctagatcgctcgctccccacccgcaccaaagcccaggcaaagggtgcttcagccacttcctgttgcaggctcagaccaagtcccctggcacccacgcggctgcagctcctcctgtgcgctgcagccacgctggccccaccctctgcagcctccaatcctgagcccctgagggaggatggggaagcagctggtctggccacccctgccctcccttagacctccagagcccccagtgtagccacagaggatgctgttggcttcagccccaagaagacgccgcttcctccagagggctaagtaagtgggaatccccctccctacttgtcctgggctccaggcagggcccctggtgtaaggcctgggctggaagccgacccacctaggtccaggctctggggcagaactgaaactccttggttactgtcggctgcagctgggagcaggccactccaaagctgtgggtccttccaggacagtctccccatgaggccggtcctccacctgctgtttcttcacacctggtggccagggatgtggccctgggtagaacgatgattctccactcctgtcattatggaagccaccgctgtctcccagcccagccagccacctgggctgcagagcacccctttcatgccctccgggtgcctcccccttctcctgccccagcctggctttgtcctaccctgctctcagggaggggtaccctggagtggggccagggcatggctctcccccgagggagttcctctctggctgtccccagggcagctctgcacagcctcagtacctggcgcacctcccttgacatccttcttagggacagtcaggcactctgtgtggggcactcaagagagccaggcccgtcagcctctagctcctgccagaatgcaggcctgaggggtgaggggcggggcaggggcaggggcagggacaggaactccggcttgctctccatccgcaaaggttcactgaggccccgagccccagccactgagccaccaagtcagcctgggccaggcctgggtgccctgtctgcaatggaggcagagacggggtctcggggcagttctgaggatgctgggtgcacagcgggggcctcgccggcaggaatcacttatgctctctcctgggccaagctttgtggatgcccagcctggggccgcggggagctggcaggtcagtggcagacactggtgggcagacctagtgtctggtagaacaggcatcaaggaagtggtgaccggagggaagccaagtgcactcaaaccctcgggtgagtcatcaccgccgggtctttcacagctgctgaaagtgagcaacagtgatgaaggtttgtgagtttctgcgtgagcgagtgaatggaccagtagcagtttccaggttgtggaagagcgttccctccccgggatggggacacttggttacagcaattcctaatcccccacccacccaccgcccactgcagaggtatgcgggggccctgcttcctgcaggcaggagtgaggggcactcctgtgatgtggcacccctgtgaccgaggtcatgtgtgatcggtgtaagggcaggaagcgagtcattggtctgcaccaggcgtgggggcttctgcgagggcaggacccaaagtcggcctggcctcccggctgcagcactcctttccctttcgaattaggttagagccctgggacgggaggtgccctgtagaccacccccctcaccaacttccgtcctccgccccacccccgcggtgatccggtgaactgccggccccctgctgtgcaccgagtggggcagtgaccctgacgtggcgtctcctgccgcccctgccaccgccaccacctccggtggcccagcctccgcattccccacccccatggaggaatgcaccaggcctcccttcctggatgcacccctcacccacatgcttccaaaccctggcattttctgctccccctttactcccaccccttcccctaggctcccagacaaaggggaactggctggatcctcttaaagggacagtgtcccaccagcttactgctgaactcccctcctcaaccccagttccctagttacagttaattagcattagcagacagcccatgagtgatacccatgcaggccccaggctgtggagagtttcctgggtaggaaacagcccttaaggtccctcatctcatccaggtcccagtctttcctacctgcctctctcctagattgtggccctttggagcctggttcttctgtccctgtgtgaccgacacatagcacccaaacagtggcagagcgggacggaccccctagcctgttctctgtgtgggtctgtaccctgacccagacatgcccccccacagcaggacccaggggggcacatgtgtgcctgcgggttcactggggcacccgcatttggtttattttattttttagagagagggtcttgctgtgtcacccagctggagtgcagtggtgtaatcatagcacactgcagccttcaactcctgggctcaagcgatcctccctccccagcctccctagtagctgggagtacaggacccactgtatcctggctaattttttaataattttttaagagatggggtcttactgtgttgcccaggctggcctcaaacctctggcctcaagtgaacctcccaccttcgcctcctgaagtgctgagattacagcatgagccaccatgcccatcccagactgacatttctatatttgttcatcctggctgggcagggctgctggtccccacccaccgggatgcttggctgggaaaaagccgggaatgtaggtctaaccctggcctgtgttgtggcacctacagcctggcattcctccccatctgcccttcaaggccccaccaaccaggcctccttggtagcctctagtgaggaaacaggcgaaccgtggctttgatgaccctgcacacctggggattctcctctatttttctttttcttttttttttttttggagacagagtctcactctgtcgccaggctggagtgcagtggcacaattttggctcactgcaacctctgcctcccaggttcaagcgattcttctgcctcagcctcccgagtagctgggattacaggtgcccaccaccatgcctggctagtttttgtatttttagtggagactgggttttgccatgttggccaggctggtctcagactcctgaccccaagtgatctgcccacctcggcctcccaaagtgctgggattacaggtgtgagccaccgctttgggaggccgaggtgggcggatcacgaggtcaagagctcaagaccatcctggccaagatggtgaaaccccatctctactaaaaatacaaaaaattagctgggcatggtggtgtgtgcctgtagtcccagctactcaggaggctgaggcaggaggatcacttgaacctggaaggcagaggttgcagtgagccgagatcgagccactgcactgcagcctggcgacagagcaagactccgtctcaaaaaacaaacaaaaagaaaacttgttctaattcttacaaaggtgcctgtagccgaggcagcggcccaggtgaggtggaggagggcgggagtggacgtctcagcccggcccctctcctgcaggtgttgtgactgcagtgcctccctgtcgcaccagtactatgagaaggatgggcagctcttctgcaagaaggactactgggcccgctatggcgagtcctgccatgggtgctctgagcaaatcaccaagggactggttatggtgagcgccccctgccttgcacactcacctggggtgggggtatccaagcagaccccatgctccaggtctctctcccatcattgtctctcctggtctcctttttgctggtctttggagctgctttctgagcctgactgtctgtctgtatccctcagcgcccccatctatggagccagctctgtccaggagctcagcagctggccagccgggtccctgcagttgtttttttggtgacacccttggaagaggcctaggggaggatctgtgggggttgttgggtctgctgagctgggctgttccctcctcacccccgcaccaggtggctggggagctgaagtaccaccccgagtgtttcatctgcctcacgtgtgggacctttatcggtgacggggacacctacacgctggtggagcactccaagctgtactggtgagtgccttggcccctccctgagcctaggaggcccacctgtgtcacagatctgcaagggtgctgactctcccacacccgggcctcctgccctttcccatggggtgaggtttgttggggcaaatgttcatatctcctttcccatcccggcatggaaacaagtgagaaataacacacagaagtcagtgtgaaaaagcctcagacggccaggcatgctggctcacgcctgtaaacccagcactttgggattccgaggtgggtggatcccttgaggctaggagttcaagaccagcctggccaacatggtggaaccccatctctattaaaaatacaaaaattaaccaggtgtggtggcgggtgcctgtaatcccagctactcaggaggctgaggcaggagactctcttgaacctgggaggtggaagttgcagtgagccaagattgcaccactgccctccagcctaggcaacagagcaagactctgtctcaaaacagaaaacctcagacgtcagctttcttactggccatgactgcagcatggtgctggcacaaaccaccagaggtggggtggatgccacaagttaaggacaccatccccagcataactgctccctctttagacaccagccacaagttcaggggtccccaacccactcacacttctgaccgactggctacaaattcagggactcccaagaccctgccaagtttgatcgtttgctaacagactcacagaactcaggaaatcctccatttttatcccagttttattatgaaggacacagctcaggtccgaccaaatgaagaagcatctcccctccctcccctagcacatcaatgtgatcaccaaccaggaagcttcactgagcttcagcagccagagtttttattgggatttcattacatcgtcatgactgattgagtcattggccgtatgatcaagcttagtctctagcccccgttcttggaggtcaggctggatgaaagctgcaaccctcttcaaatcacatgatgtatctttgcggggctgagtcatctcattagtatcaactcaggaatagtctgaggggctcatgaataacaaagataccccattccaaggacttagagtctccctcccaggaatcaggacaaaacccagacagattctttcttatacaacactgatcaagctggattagaggacaacgtggcttgatcccagatgggcttttaatgacttcctcctgaactggatttatcctcaggccttgtcctggccgccttacaggatcacagcgagtagacagacccgaatgactcagagggacgagggctggctgggcacgcacagttcctgctcccagttccataggaagagtgaaagaaaagaaagctggccaggtgcagtggctcacccctataatcccagcactttgggaggccaaggcaggcagatcacctgaggtctggagtttgaggccagcctggccaacatggtgaaaccgtctctactaaaaataagaaattagccaggcatggtggtgcttgcccgtaatcccagctactcaggaggctgaggcaggagaatcgcttgaacccaggaggcggaggttacagtgagccaagatcacaccactgcacttttggacaattgctagctttccttttcttttgagacagagtcttgctttgtcacccaggctggggtgcagtgttgtaatcaacagagtgagactccatctcaaaaaaaaaaaaaaaaaggaagggattgggggaagagcctggggctgggggctgcagagatgctgaaattgatgacgcccttgacactcttttcttcccaccccggcggctcttgcagcgggcactgctactaccagactgtggtgacccccgtcatcgagcagatcctgcctgactcccctggctcccacctgccccacaccgtcaccctggtgtccatcccagcctcatctcatggcaagcgtggactttcagtctccattgaccccccgcacggcccaccgggctgtggcaccgagcactcacacaccgtccgcgtccaggggtgagtggccggcctgccgaggctgccgtcggtgtggctatggctgttgatgtgggtggcagagtctggcactgggggccctgaaaatgaatgggcgagtgtttgggtacagatggggcccagttctgacaacctggtttgccagatttctggcccagtcattcctctgaataccattacaaatgccagatacaataaaaagacattttcaaccgggcatggtggcccacacctgtaatctcagcacttcgggaggccgaagtgggtggatcacctgaggtcaggagttcgagaccagcctgggcaatgtggtgaaaccccgtctctactaaaaatacaaacgtagccaggcatggtagtgtgtgcctatagtgccagctgcttgggaggctgaggcaggagaatcacttgaacccaggaggtggaggtttcagtgagccccgactgccattgcactccaggctgggcaacaagagtgtaactctgtatcaaaaaaataaaaataaaaaaaacacactcaaaaaataaaaagacattttctttagtccatgtctgatccaacaagaaagaggaggaaccaagtcaagaatgagtgaagaagctgggcgcagtaactcacacctgtaatctcagcactttgggaggccaaagtgagaggatcacttaaggccagaagtttgagaccagcttgggcaacatagcgagacctgcatgtctacaaaaaaaaaaaaaaaaattaaaaattagccaggcatggtgaaatcactgaacacataaaggctgggcatggttgctcacacttataatcgaaacactttgggaggctgagatgggaggatcacttgaggccaggagttcgaaaccagcctgggaaacattgtagtcacagctacttgggaggctgaggcagaaggatctcttgagcccaggaagtggctacagtgagctataattgcacgactgcactctaggctgggcaatggagcaaaaccctgtctcaaaaaaatggggcagggctgataaagattagattactgtgtgactttgagcagctgctttctctctaggctttgggggtctgtttgaacaatgagggagttggataccttggagctttctaagatttctgtggcgcctttattgacaccttgagaagtagcatgcagtgtttctacttttgggcaattggtcacttctttttttttgagacagtctcactctgtcgcccagtctggggtgcagtggtgtgataccagctcactgcaacctccacccacaaggttcaagcaattcttgcacctcagccccctgagtagctgggactacaggtgaccacatgtggctaatttttgtatttttagtaaagacagggtttcaccatgttggccaggctcgtttcaaactcctgggctcaagtgatcctcccttctcggcctcccaaagtgccgggattacaggtgtgagccaccgtgcccggcccaagtgctagctttctctctctctttttttttttttcgagacggagtctcgctctgtcgcccaggctggagtgcagtggtgtggtctcggctcactgcaagccccgcctcctgggttcacgccattctcctgcctcagcctcccgagtagctgggactacaggcacctgccaccatgcccggctaattttttttttatatttagtagagacagggtttcaccatattaggcaggatggtctcgatctcctgacctcgtgatccgcccgtctcggcctcccaaagtgctgcgattacgggcatgagccaccacgcccggccctaccaagtgctagctttcatttgacgcagtgaatgtttcttgtacacctggcaggtgcctggcactgcataggcactgttgagatgtgaaggtggccctggggacagaaaattatactgggcttgactgtgtgtctccatcccttgacatcagccaagccagcagctgctttacatacatgatgagcagacagctgcttgaaagagatgaggaaactcccagaccaacggctcttaccagagggccaagggaggtccccacagagtcagaggctgcagctggtccctgaaatccaggcagaattttagaaatgaagacagtcagctgggtgcagcggctcatgcctgttatctcagccacttcggagggctgaggtgagaggattgcttgagcccaggaggtggaggctgcagcaagctatgatgacaccatgcattccagcttgggcgacagagcgagaccctatctctaaaataaaaatgaagaagacagttaatgacgtctcctccctgtctgcctcactgggtaagcattcgcccagccaacatctggaacatcccagttctgcaaagagccacacccttcccagaaagagcccaacttgccaaagatttacttatttgttttaaactggttttagttgaccgcttttcattttgtgtatagcagcgttttaaggaaggtctaatttatccaggccacctgctgctttagcaaaccaagggagaggatgtgagattctaaggaatttacatatgtatgtcatatatatatatatatatagacacacaatttttttttgagacagggtcttgctctgtcatacaggctggagtgcagtggccaatcatagctcactatagcctcagatgcctgtgctcaagcaatccactcacctcggcctcctgagtagtgagactacaggcacacaccaccacacccagctaattttttaattttttgtagagactgagtcttgctgtgtcgcccaggctagtcttgaactcctgggctcaagcaatcctcccacattggcttcccaaagtgctaggattacaagcgtgagccactatgcctggcttatttttaaggttatatgcatgcaaagcctgtatcaatgaaaatattttctttggtttttttcaacttttcatcttcgcattttgcagatttatagaaaatttgctaaaataataagtccattgaatacatacacacccttcaccaaggttcaccaattcgtaactgccatatttgggagttatatgtgtgtctctctatatatacatatatggatacagatacatatacatgtttagtgacttgtttatatttgtacatacatgtacatgttgttatttattgatcgtttgggagtaagttgcagggatcattgactcccccacaattatgctagatattctcaaaagaaggaccttctcttttttttttttttttttttttttttggagacagggtatcactgtcattgaggctggagtgcagtgatgcgatcacagctcactgcagcctcaacctcccaggctcaagtgatcctcccacctctgcctcccaagtagctgggactacaggcacgggccaccacgcctggctaggcattctgttatgtaattatccaattgtatcttatagttcagtgatcacattttggaaatgtaacattgataccattatctaatacacagaccatattcaaattttgcctattgtctctatactgaactactgaactgtcctttatagcaatctccccctcatccacagtccagtccatgatcaacattgcatttaatcgtcatgtgtcatcagtatcttttttttttttttttttgagacggaattttgctcttgttgcccaggttggagcgcaatggcgcaatcttggcttattgcaacctccgcctttgggcttaagtgattctcctgcctcagcctcctaagtagctgagattacaggcgtgcaccattatgcatgcctaatttttgtatttttattagagacggggttttaccatgttgccctggctggtcttgaactcctgacctcaaatgatccacccacctcagcctcccaaaatgctgggtttacaggcatgagccactgcgtctggccatttcctcagcctttcattgcccttcatgatcttgacatttttgaagtgtacaggccagtcattaaagtaaaatgtttttccttttttttttttttttttttaaaaagagacagggtctcactgtgttgcccaggctggtctcagactcctaggctcaagtgatcctcccgcctcagcttcccaaagtgctgggattacaggcgtgagccatcgtacctgccctcgcatttgggtttgactgatgtttcctcttagggagacaggctctgcaggtttggcctgatactgcataagtgatcctctgtccttccgagtggatcttgccaggagacatatgatgtcagtgtgcccttggctgaggatgttcactttgattacttgttttttctgtactgtaaggatttttttccctttgtcatcaataaaccatttgtgagatttgagtctgtaaatatcctgttcccaaaaacccttccccaaatgatttgagcatctattgatgattcttgcctgtagcgattattactagggtggctaccaaatgctgaatttctaactctgttcttccttctgcatttgttactgtaaggaagagcttctcccccatacgagaatagtctttttgtttgcttggttgtttttttgagatagggtctcactctgttgcccaggctggagtgcagtgacatgatcatagctcactgcagcctcgacctcatgggctcaagcgatcctcctgcctcagcctctcgagtagctgggactacaggcagcaccaccatgcctggctaattttttattttttgtaatggtgaggtctcactattttgctcaggctggtctcgaactcctgacctcaagtgatcttcccacctcagcctcccaaatagctgggattacaggagtgtgccaccatgctcagctaattttctgtaaaaaatgtcatagagatggggtcttgctatgctgcccaggctggtctcaaacccctagtctcaagcaatcctcccaccttggcctcccaaagtgctgggattccaggcatgagccaccacacctggccctgtttttcttaaagttctcagtctcctctctgccttacccccatccccttttccatctccaggacctagggcagagacaaagtgagcattccctaaaaagcttttatgaggcaaaatgaaaaccagctcacgcctataatcccagcactttgggaggccaaggtgggtggattacctgaggtcaggagttcaagaccagcctgaccaacatagagaaaccccatctgtactaaaaatacaaaattagccaggcatggtggcacatgcctgtaatcccagctactcaggagcctgaggcaagagaatcacttgaacctgggaggcggaagttgcaatgagccgagatcactccattgcactccagcctgggcaacaagagcaaaactctgtctcaaaaaaaaaaaagaaaagaaaagaaaaccaggtccctaacaccgaagagttaaaagaaataagtaaatttggcaaattggtctttttgtgagttagcttataggcaactgatcgagggtctctttcccgtcttcaccctgcaattgtggctcagggcaagctgccagctccctcctgccaatgcaggagcaatagagcttggcctcctcttgcagggcgagtttgggagtcagatatgaagccactaatccgggacctttttgggacccaaggcactcatctgccccaagcataccaggcaggccaggtgcaatgactcatgtctgtaatcctagcactttgtttttgcgacggagtctcgctctgtccacccaggctggagtgcagtggcagaatcttgactcactgcaacctccacctcccaggttcaagcaattcctgcctcagcctcccaagtagctaggactacaggcgcccactgccacgctcggctaatttttgtattttcagtagagacggcgtttcaccatgttggccaggctggtctcaaactcctgacttcaagtaatccatccaccttggcctccccaactgttgggattacaggtgtgagccactgcgcccggccagtcctagccctttgggaggctaaggcgggcggattgcatgagctcaggagttcgagaccagcctgggaaatgtggtgtaaccccgtctctactaaaaatacaaaaaaaattagctgggtgtggtggtgtgcacctgtaatcccagctactcaggaggctgaggtacgagaatcgcttgaactcaggaggcagaggctgcagtgagctgagattgtgccattgcactccagcctgggtaacagagtgagattctgtctccaaaaaaaaaaaaaaaaaaaattcgagaccaaacatacctgggatttggaaggatagatctgttcccccagggtggagacaatggtccattgaatgggaacagctgagcatcttgtgtgggtggccagtgcctacaagcgtgccacctttctccagctcacacctgtggcagacatcagtaattgattacagaattcctcccctgaaaccagaactcggtgttctggccatctgctacttcccagtcacacgaagtagaatcctccacctgctcaccctggatctggtgcccttcgccttggtttcctgttggggctctgagggacaggtgggcactggcctgacccctgccttacccacagagtggatccgggctgcatgagcccagatgtgaagaattccatccacgtcggagaccggatcttggaaatcaatggcacgcccatccgaaatgtgcccctggacgaggtacggtcctgagtctgtggggcaggacgggaggtagtgccttcatgcctagccccctccccactccacccccattcacatgcctgctgtccccagattgacctgctgattcaggaaaccagccgcctgctccagctgaccctcgagcatgaccctcacgatacactgggccacgggctggggcctgagaccagccccctgagctctccggcttatactcccagcggggaggcgggcagctctgcccggcagaaacctgtcttgtaagtcagcctgctcctcggttcagctgggtgctttcactcctgctggggctcaggggctgtgggacctaggtcggggagccagccctgcacaaatgcagcccaggcttgagccagggaggtggaggctgcagtaagctgtcatcacaccactgctctccagcttgggtgacaaaacaagacccactctcaaaaaaaaagaggaaacacacattttttaaaaagccggggacggggccaggcgtggtggctcatgcctgtaatcccagcactttgggaggccgaggcaggtggatcacctgaggtcaggagttcaagaccagcctggccaacatgggaaacctcatctttactgaaaatacaaaaattagccgggcttggtggcaggtgcctgtagtcccagctactcaggaggctgaggcagatgaatcacttgaacccaggagatggaggttgcagtgagccaaggtcacgccactatactccagcctgggcaacagtgtgagactctgtctcaaaaaaaaagaggatgacagagcaggatctgaggggttgaggggagctgggggctgccactagagccaggataggccgagacactgggatgggcagcctttggactgtcccaggcgggccctcccaaagcagggggtgattgcatagactggcatggacaggggcatgcaggcaggaggaggaaggggcagggccttggccgggtgctacctgtcccccggtggcacttggcaccatgtgtgccccccaggaggagctgcagcatcgacaggtctccgggcgctggctcactgggctccccggcctcccagcgcaaggacctgggtcgctctgagtccctccgcgtagtctgccggccacaccgcatcttccggccgtcggacctcatccacggggaggtgctgggcaagggctgcttcggccaggctatcaaggtacagagcatgccagggtctcaggggacagtctgggtgggacccctccatcctccttccttcccagtctatggaaacacagtggaaggggtatctggcttccagactccctggccagtgccctctcctcccttggcctcctggagctaattaggaacaggggacctcctacaggtagactgagaccttatgtgcgggaggtcattgaaaggtggctcctagccaggcacagtagtttatccctgtaatcccagcaccatgagaggctaaggctgtaggatcgcttgagcccaggaattcaagaccagccttgacatcatctctacaaaaaatttaaaaattaattgggtatagtggtgcatgcctgtggtcccagctacttgggaggcttaggcaggaggattgtgagccaggagttcaaggctgcagtgagctatgatcatgccacagcactccagcctgggcaatagagcaagaccccatctcaaaaaaaaaaaaaaaagacaagggattaatacatcccatccacttgggtatttgggaacatcccatgcacagcctagagtatgaagccatctgcacatctccctggcagtcctggggtggagatggggcttcctagaaggcgggcttacagcagagcttctgtcttcacacctctgtgtcccacacgcaggtgacacaccgtgagacaggtgaggtgatggtgatgaaggagctgatccggttcgacgaggagacccagaggacgttcctcaaggaggtcagtgagcggaatgccctcttccctccagagggacttccaggtgctcacccctgccccatcaacacaggtcggaaaagggctctgggaaccattgaaagaagagcgagcaggccaggcatagtggctcacgcctgtaatcccaacactttgggaggttaaggagagaggatactttgagaccaacctgggcaacatagcaagaccccgtctctacaaaaaaattttaaattaaccgagcttggcaatgtgcacctgtcatcccagctactcggggggctgaggtgggaggctcgcttgagcccaggagttggaggctgcaatgagccatgatcgcaccactgcactccagcctggggaacaaggcaagaccctgtgtccaaaaaaaataaaagtaactgcattggtcgggcatagtggctcacgcctgtaatcccagcactttgggaggctgagccgggcggatcacctgaggtcaggagttcgagactaccctggccaacatggcaaaaccccgtctctactaaaaatacaaaaattagcccagcatgatggtggtgagtgcctgtcatccaggctactcaggaggctgaggcaggagaatttcttgaactcaggaggcggaggttgcagtgagccaagatcgtgccgctgccctccagcctgggcgacagagtgagactccttctcaaaaaaaaaaaaaagaaaagaaaaaagaaagtaactgcaggcaggggactgggaaaaagagcatcgctgggggtgggggcagctcaagcagagggcacaggacgccagagggtgtggcagaggcaggagaggggagctgggggttccgtatctttgagaccgcctacagcccctggtgggatggaaaagggagaagcagacccaagcacagctgggaccacacagagcccgggcccagcctgtttgtgccccgccaggtgaaggtcatgcgatgcctggaacaccccaacgtgctcaagttcatcggggtgctctacaaggacaagaggctcaacttcatcactgagtacatcaagggcggcacgctccggggcatcatcaagagcatggtgagtcctgggcagagccagccacccccgctgtgcggccccgggcaaagcagctccctctgtgagcctcagtctcatctcttcaatggggggaagccacaggggtctcaaaggccctctgaaccctgattcctaatcaaaaaggggagcgactgactccatctaaagctaggaaaggccaggtacaatggtgcacacctgttattctggcactttgggagcccaaggcaagaggatcactcgaggccaggaattcaaggctgcagtgagctgtgatctcaccactgcactccagcctggaccacacagcaagaccctatctcaaaaactaaaataaaattcagagctttccttaaggatttgaataaaattacaaatccatctttagaaataaagtgctcaggccaggtgcagtggctcatgcctataatctcagcactttcagaggctgaggccagcagatcacctgaggtcaggagtccaagaccagcctggccaacatggtgaaaccccgtctctactaaaaatacaaaaattagctgggcctggtggcaggcacctgtaatcccagcactttgggagactgaggttggcagatcacctgaggtcaggagttcgagaccatcctggtaacccgtctctactaaaaatacaaaaaattagccgggcaaggtggcaggtgcctgtagtcccagctactcgggagactgaagcaggagaatggcgttgaacccagggggcagagcctgcagtgagccaagatcgcaccactgcgctctagcctgggtgacagcgagattccgtctcaaaaaaaaagcacttggaggaagcctcacagagtcctgtgctggaccacaccctggggatccagtcctggcctccagccccatttctgtaccaccctgagaccatgggatcttcctcaggttggattaccttgtatccaaggtgtggaccctatgggctcctgctaggtgtaacttgacacaacgggttccgttgtcaggtgcaatttagaaactctgggctaggccaagcgcagtggctcacacctgaattcccaaactttggaaggccgaggcaggagggtcactagaggtcaggaggtcaagaccagcttggacaacataatgagatcccaatcccatctctacaaaaaaaattaaaaaattagccaaatgtggtgacacatgcctgtggttccagctccacaggaggctgaggcagaaggatcacttgagcacaggaggtcgaggctgcactccagcctgggtgatagagtgagaccctgtctcaataaaaaataaagatctccaaggggatgaggtttgagaatgaggcgtctcccccaaatgatttgagcccaaagccccgttctcctggcatggctcagtgctgccactgcgcaggtgaccttgctgggcccttctacctcttacctgtctgtgaaagtaggttctaattttttaaaaacctagaaagatgagttttttgtttttgtttttgtttttcccgagatggagttttgctcttactgtccagcctgaagtgcaatggcgtgatctcggctcactgcaacctccacctcccaggttcaatcgattctgcctcagcctcccgagtagctgggattacaggagcccaccaccacacccggctaatttttgcgtttttagtagagacagggtttcaccatgttggtcaggctggtctcaaactcctgacctcgtgatccaaccactctgacctcccaaagtgttgggattacaggcgtgagccaccacacctgacagaaagatgagattttatagaaaataaatatagcttgttttctcagaggaggcagattgggagctatagaggaatatccctgcttagagtttgaaatcagttctgttaggaaataatgtttgtaggggccgggtgcggtggctcacgcctgtaatgccagcactttgggaggctgaggcaggtggatcacttgaggttaggagtttgagaacagcctggccaacatggtgaaaccctgtctctactaaaactacaaaaattagctgggtttggtggtggacacctgtaatcccagctacttgggaggctgaggcgagagaattgcttgaggccgggtgcagtggctcatgcctgtaatcccaacactgggaggccaaggtgggcagatcacctgaggtaaggagttcaagaccagcctgaccaacatggtgaaaccccgtctctactaaaaatacaaaaaattagctgggtgtggtggcgcatgcccatagtcccagctactcaggaggctgagacacaagaatcacttgagccccggaggcgaaggttgtagggagctgagatggtaccactgcactccaccctgggtgacagagtgagactccatctaaagaaaaaaaaaaaaggaaataatgtctgtgagctgtgttgactcatactccttagaagcagacagttgtgggtgcccgaagaaatcggggtgttggggagcccagggaccctctaggacgcttgcctcttcctgcctctgtctcatgcaaccatccctgccatcggggcccccaccggccccaccctggccattctttctccatcccaggacagccagtacccatggagccagagagtgagctttgccaaggacatcgcatcagggatggtgagtgagccgggtgctctagctccattcataatcccaccaggaatttgcaaacagaacccacaaagaagctttgaaagagggcagagggggtcgatgggagagtgggaagaatcgtcccgactggcctgattggggtgggagcagagggagttcctggggagccaggatgggctggggtccctctgcacagctgccccctgactcccgtgtccccgtccctaggcctacctccactccatgaacatcatccaccgagacctcaactcccacaactgcctggtccgcgaggtgagtaccagggccccacgtggctgggtgtcaggagacagcaggagcccatccaaccccagcctcagggccttcccagaactggaggcccctccatgttgcctccatgacttcaatttgaggtgggggtggggggcagcagcccgtggggaagagcgcagggtcaggaggcagacagacctgggtttgagtcctgtctctgccactgactcatggtggaccatcagagtcccaggctggtaggagggtctcataaatcaatgaaggagaaagtgacatgtaagctacaaaggaccaggaccgtggtcttcatagagcacagcccatggcagagtggccatgggctacaccagacagcaccagcatctgggggccacagagtgggggcataggcgtatgggctggagtggtcagggcaggcttcctgaaagaggaggcttggccagacacagtggctcacacctgtaatcccagcactttgggaggccgaggcaggcggatcacgaggtcaggagatcgagaccgtcctggctaacatgggcactgtggctcacacctacaatcccaacactttgggaggccgaggtgggtggatcacttgaagccaggagttcaagaccagcctggccaacatggctaacacggtgaaaccccatctctactaaaaatataaaaaattagccgggcgtggtggcaggtgcctgtagtcccaactacttgggaggctgaagcaggagaatggtgtgaacccgggaggcggaacttgcagtgagccaagatcgcgccaccgcactccagcctgggtgacagagcgagactccatctcaaaaaaaaaaagaggaggctttaggtggatatttaagcaggggacgggcaggcaaagagcccagtgtctaaggattgtcaagggaggagagcccggttctccaccaaaagcacaggagcgagtaaccatgcccatctggagaggtggtgtattcgtgtcctggggctgccatcatgaagtactgtgaaccagatggctcaaaacaacagaaatgtgctgggcacagtggctcacacctaaaatcccagcaatttgggaggccaaggcaggtggattgcttgagctcaggagtttgagaccagcctgggcaacattacgaaagcccatctctgccaaaaatacaaaacggaatagccagccgtggtggcataagcctatggtcccaactacctgggaggctgaggtgggaggatcacttgagcctgggaggtagaggttgcagtgagccaagattgtgctactctactccagcctgggagacagagccagaccctgtctcaaaaaaacaaaacaaaacaaggccaggcactgtggctcacgcctgtaatcccagcactttgggaggccgaagtgggtggatcacttgaagccaggagttcaagaccagcctggccaacatggcaaaaccctgtttctactaaaaattcaaaaattagcaggcatggtggcgcatgcctgtaatcccagctactcgggaggctgaggcaggagaattgcttgaacccaggaggcagaggttgtagtgagctgagattatgccactgcactccagcctgggtgatagagtcagacaccgtctcaaaaaaaaaaaagcatcacatggcaagaggggctgacaagagacccccaaactgaccattatacagacccactcttgtgataactaacctggtccctcaataacccattaatctgttaattcatacagagccctcatgacccaatcacctcttacaggccctgcctcttaataccgttagagtcaggccaggcatggtgacatgggcctgtagtcccagctagttggaaggctaggtgggaggatcccttgagtccaggaggtaaatgttacagtgagctctgattgtgtcactgcactccagcctgggcaacagagcgagcccctgtttttaaaacagcaacaagccaggcacagtggctcacgcctgtaatcccaacactttgggagactgaggcaggcagatcacttgaggtcaggagttcaagaccagcctcaccaacacagtgagacccctctctactaaaaatacaaaaattagctgggcgtagtggtgggtgcctgtagtctcagctactcatgagactgaggcagaattgcttgaacccgggaggtggaggttgctgtgagccgagatcacgtcactgcactccagcaacagagtgggactccatctcaaaaaaaataaaaaataacagagatctgtgttggcttacacctgtaatcccagcactttgggagtccaaggtgggcagattgcttgagcccaggagtttgagaccagccaggcaacatggcaaaaaaataaaaaaatttgtctctacaaaaaaattaaaaaattagctggcatggtggtgagtatctatagtaccagctactcaggaggtggaggtgggaggatcgcttgagcctgggaagttgaggctgcaatgagctgtgttcgtgccactgcactccagcctgggccacgggagggagactctgcctcaaaaaaaaaaaaaaaaaatcaaacccgaaaagcaaaaaacatagacctcacctgcttattgggaatattcaagataaaattaggccaggcacggtggctcacgcctgtaatcccagcactttgggaggccgacgtgggcggatcacgaggtcaggagatcgagaccatcctggctaacacggtgaaaccccgtctctactaaaaatacaaaaaattagctgggcatggtggcaggcgcctgtagtcccagctacttgggaggctgaggcaggagaatggcgtgaacctgggaggcagagcttgcagtgagctgagatcgtgccactgcacttcaacctgggcaatagagcaagactccaactcaaaaaaaaaaaaaaaaagataaaattgggccaggtatggtggcttactcctgtaatcccagcactttgaaaggctgaggcaggtggaccacttgaggccagaagttgaagaccagtctgggcaacatagcaagaccctatctcaatcagtcaatcaacctaaataaatagtaaatctggtggcatgccaagcacaggacctgggtctataatcaaaattcctgtcttgatgggcacagtggctcacacctgtaatcccagcactttggtaggccacagtgggtggatcacctgagatcaggagttcgaaacctgcctagccaagtatggtgaaacccgtctttactaaaaatacaaaaattagccaggcatggtggcaggcgcctgtaatcccagctactcgggagggtgaggcaggagaatcgcttgaacctgggaggcggaggttgcagtgagccgagatcatgccactgcgctccagcctgggtgacagagcaagactccgtctgaaaaaaaaaacaaaagaattcctgtcttctctccgaaacaaagcagcatcagtgcccccgcaggtgggagggagcgcttgcaggagggagcagtgggtccgccacgacggtctggggagcaggtggggagggggcagagggtgcagcgtgtggtgggagggaggaagccacactgctatcttcaggtgcttcccgcagctccatttgcaaagagcggatgggtttggggaaggaaggggtccccaccctgtgccaatacagcgtatcagaggtatgttctctgggctgtctacgggttggcttggggtcctggggaggggcaggccaagcgggcagtactaggatcgggtcccagcatgacccggcttcaccttcccagaacaagaatgtggtggtggctgacttcgggctggcgcgtctcatggtggacgagaagactcagcctgagggcctgcggagcctcaagaagccagaccgcaagaagcgctacaccgtggtgggcaacccctactggatggcacctgagatgatcaacggtgagtggttcagccctgcccatcatggccctcacgggaagccatgggggagcccaggagagctgtaacctcccaagcccctggcccctcccagcctccttggctcttcagttaccctgtgggtcctgttgctcctataacacacttagtggcagccaggcacggtggctcacgcctgtaatcccagcactttgggaggctgaggtgagtggatcacctgaggtcagtagttggagaccagcctagccaacatggtgaaacccccattctttactaaaaatacaaaaattagctgggcatggtggcgggtgcctgtaatcccagctactagggaagctgaggcaggagaatcgcttgaacctgggaggcagaggttgcagtgagccgagatcgcgccattgcactccagcctgggtgacgagcgaaactccatctcaaaaaataaataaatagaagacacttagtggcttaaataaatgatcatacagttctggagtctgaagtccagcgtcagcctcaccgggctgaaatcaaggcgccggtagggtgagctccttctgcaggctccggggcacctgtttcctgaccttttctggctcgtggaggcttcctcattcctcctgttgctgccccctcctctgtcttcagggctggctgcaaagcatcttctcttctctgatctctgcatccatccccgcatctctttccctggctctaaccttcctcctttttttttttttttttaaagagggtctcgctctgttactcaggctggagtgcagtggtgccaccatagctcactgcagcctcaaccttctgggctcaaactgtcatcccaccccagcctcctgaatagctgggaccacaggcatgcaacaccacacccagctaatttttttattttttattttttatttttttttgagacagagtctcgctgtgtctcccaggctagagtgcagtggcgtgatctcagctcactgcaagctccgcctcctgggttcacgccattctcctgcctcagcctcccgagtagctgggactacaggcgcccgccaacacgcctggctaattttttgtatttttagtagaaacggggtttcaccgtgttagccaagatggtgtcgatctcctgacctcgtgatccgcccgtctcggcctcccaaagtgctgggattacaggcgtgagccaccgcgcctggccaattttttaaatttttaatagagacgggggtatcactatgttgcccaggctggtctcaaactcctggcttcaggcgatcctcctgccttgacctttcaaagtgctgggattccaggcatgagccaccatggccctccatccttctgatagggacccttacggtgacattgggcccacctggataatccaaaagcagccctccatctcaagaccctcaacttaatcccatctgcagagtccgatggaaggtgggacgtatacaagtcccagggatcaggacgcagtcatctttggggatcatagttctgcctcccacagggtctgcttccctcagtccatttctttgctgtcaatggtcctatatatgcccagattataggttataaagtccttctacaagcaggtgacacatgaacacaggttcagggcaggcagaccccagccatcacctcatcatagttaacctagttaaattagcctggcatgtggcgtggtgcctaatgcctgtggtcccagctactcaggaagccaaagcgggagatttacttgagccaaggagatcaaggctgcagtgagctatgatcataccactgccttctagcctgggcaacggagtgagaccctgtctcaagaaaacaaaaaataggccaggcacagtggctcacacctgtaattccagcactttgggaggctgaagcaggcggattgcttgaggccaggagttcgagaccagcctggccaacatggtgaaacgctgtctctactgaaaatacaaaaattacccgggtgtggtggcacagctactagggaggctgaggcaggagaatcacttgaacccaggagcagaggttacattgggccaagattgcaccactgcactccagcctgggcaacagaggaagactgtgtctcaaaaagaaaaaaaaaaaaaccttcctgtaatcccagcactttgggaggctgaggtgggcggatcacgaggtcaagagattgagaccatcctggtcaacatgatgaaaccccatctctactaaaaatacaaaaaaattagctgggcgtggttgcacgcgtctgtagtcccagctacccgggaggctggggcaggagaatgatgtgaacccaggaggcggagcttgcagtgagccgagatcgcaccactgtactccagcctgacgacagagtgggactctgtgtcaaacacacacacacacacacacacacacacacacacacacacacacacacacagagttaacatagcccgcaaagaagactataaaacagtcttagtggccgggcgcagtggttcacgcttgtaatcccagcactttgggaggccgaggcaggtggatcatgaggtcaggagtttgagaccagcctggccaacacagtgaaaccccatctctactaaaaatacaaaaattagctggacatggtttcgggcgcccgtaatcccagctactcaggaggctgaggcaggagagttgcttgaacccaggaggcagaggcaggagagttgcttgaacccaggaggcagaggttgcagtgggcgacagagcaagactctgtctcaaaaaacaaaaaagtcttagtgtttcctatgtttagggattagtgtgaggattaaaggttgtaaactcatttccacctagttggcattcagtaaatgagaattgacatttagtactaattgtttcgggtattttgttttttgttttttgttttttgttttttctgagaccgagtcttgctctgtcatccaggctagaatgcatggtgcgatctcggctcactgcaactccgcctcccgggttcacaccattctcctgcctcagcctcccacgtagctgggactacaggcgcccgccaccacgcctggctaattttttgtatttttagtagagacggggtttcaccatgatctcgatctcctgacctcgtgatccacccgcctcagcctcccaaagtgctgggattacaggtgtgagccaccgtgcccggccagttttttgtttttgagatggagtcttgcattgtcacccaggctggagtacagtggcgtgatctcggctcactgcaacctccacctcctgggttcaagtgattctcctgcctcagtttccctagtagctgggattacaggcacctgccaccatgcctggctaatttttctatttttagtagagatggggtttcaccatgttggccaggctgatcttgaactcctgacctcaggtgatccacccgcctcggcctcccaaagtgctgggattacaggtgtgaaccactgtgcccggccatgtaccgattatttttaacatcattaagtagctggtatcattcccattttacaataaggaaactgaggctcagagagtctgtgtcagtttcctgaggttgctgtaataaattgttagaaacttgattatttaaaacagcagaaaatggtcaggcacagtggctcacacctgtaatcccagcactttgggaggccgaggcgggcagatcactggaggtcaggagttcgagaccagcctggccaacatggtgaaacaccatctctactaaaagtacaaaaattagctgggcatggtggcaggcgcctgtaatcccagctactcgggaaattgaggcaggagaatcgcttgaacccaggaggcagaggttgcagtgagccacaatcgtaccactgcactcttgcctggacaacaaagcaagactccatctcaagataaaataaacagcagaaatttattccctcttagttttggaagccagaaggttgaaatccaacagggctgcgctccctccagggcgatctaggggagaatgcattccttgcctcttccaccttctggttgttttgcattcctgggcttgtggccgcatcactccagtctccacccctgtcttcacagggccacctcctcctcttctgctgtgtcttctctgtgtctctctcaagagggcatttgcagtggcatttggggcccacccagatcatccagcatcatctcatctccagatccttaacttaatcccatctgcaaaagaccctttttctgacccagtaacattcacagattccagagacctgacatggttcccttttgggaccagcacagagttcatgacttgtgcaaagtcacgcagctgatcggtgcctcgaactccttgtccagggctctgccccttgctcctcagagctcccaaaggcttgctcagacctggtggggttgggggaaagagcctaagcctgggttcccatagaggttgccggcatctgcctcctgggcctggacctcccggccggggcatcctcccagctggcctggtcccctgccttttggcatccctggcacccccatgtgttcatctgctgacagtcggtctctttatccaggccgcagctatgatgagaaggtggatgtgttctcctttgggatcgtcctgtgcgaggtaggtccagggttgggtagcagcggtgttgaggcctgggctcctccccactcacccaggctgcaggctcagcatctgcaggggcctcatgccaggaagcctgcccacagcaaggcatgggctggcccccatggggtactgcagtcaggctgcagccaggcccagtgccacctgccctcaaaccacctggatggcacccagatgcccaggctgagggccccctggagtaactgccgggccttgtactggacagatcatcgggcgggtgaacgcagaccctgactacctgccccgcaccatggactttggcctcaacgtgcgaggattcctggaccgctactgccccccaaactgccccccgagcttctaccccatcaccgtgcgctgttgcgatctggaccccgagaagaggtgagtggggtggggccctggcctgggagacggtggggccgattcccgggacagccagacccaccgttccccacccacctgtcacccaggccatcctttgtgaagctggaacactggctggagaccctccgcatgcacctggccggccacctgccactgggcccacagctggagcagctggacagaggtttctgggagacctaccggcgcggcgagagcggactgcctgcccaccctgaggtccccgactgagccagggccactcagctgcccctgtccccacctctggagaatccacccccaccagattcctccgcgggaggtggccctcagctgggacagtggggacccaggcttctcctcagagccaggccctgacttgccttctcccaccccgtggaccgcttcccctgccttctctctgccgtggcccagagccggcccagctgcacacacacaccatgctctcgccctgctgtaacctctgtcttggcagggctgtcccctcttgcttctccttgcatgagctggagggcctgtgtgagttacgcccctttccacacgccgctgccccagcaaccctgttcacgctccacctgtctggtccatagctccctggaggctgggccaggaggcagcctccgaaccatgccccatataacgcttgggtgcgtgggagggcgcacatcagggcagaggccaagttccaggtgtctgtgttcccaggaaccaaatggggagtctggggcccgttttccccccagggggtgtctaggtagcaacaggtatcgaggactctccaaacccccaaagcagagagagggctgatcccatggggcggaggtccccagtggctgagcaaacagccccttctctcgctttgggtcttttttttgtttctttcttaaagccactttagtgagaagcaggtaccaagcctcagggtgaagggggtcccttgagggagcgtggagctgcggtgccctggccggcgatggggaggagccggctccggcagtgagaggataggcacagtggaccgggcaggtgtccaccagcagctcagcccctgcagtcatctcagagccccttcccgggcctctcccccaaggctccctgcccctcctcatgcccctctgtcctctgcgttttttctgtgtaatctattttttaagaagagtttgtattattttttcatacggctgcagcagcagctgccaggggcttgggattttatttttgtggcgggcgggggtgggagggccattttgtcactttgcctcagttgagcatctaggaagtattaaaactgtgaagctttctcagtgcactttgaacctggaaaacaatcccaacaggcccgtgggaccatgacttagggaggtgggacccacccacccccatccaggaaccgtgacgtccaaggaaccaaacccagacgcagaacaataaaataaattccgtactccccacccaggtcctgcgtggcgatgtgtgtctggggccctggggaaatagtcaaggtaagaggagttagtcttccctgaccagaagacaaggatgagtgtggtggctcatgcctgtgatcccagcactctgggaggctgagacaggacgatcccttaagcccaggagttcaagaccagtctggacaacatagtgagatcctgtctctacaaaaatttttttttaattagttgggcagaggccaggtgtggtggctcatgcctgtaatcccagcactttgggaggcagaggcgggtggatcacctgaagttaggagttcaagaccagtctggccaacatggtgaaaactcgtctctactaaaaatacaaaaattagccgggcgtggtggcacatgcctgtagtcctagctacttgggagactgaggcaggagaatcgcttgaacccgaaaggcagaggttgcagtgagccgaggtggtgccattccactccagcctgggaaagagcgagactttgtctccaaaaaaaaaaaaaaaaaaattggcaggccaggcacagtggctcacacctgtaatcccagccctctgggaggccgaggcaggaggatctcctgaggtcaggagtttgagaacagcctgactgacatagtgaaaccccatctctactaacaatacaaaattagccaggtgtgatggcacatgcctgaaatcccagctacttggggggttgaggcaggagaattgcttgaacccaggaggcagaggttgcagtgagccgagatcgcaccattgcaccccagcctgggcaacaagagcgaaactccatctcaaaaaaaaaaaaaaaaattagttgggcatggtggcatgcacctatagtcccagctactcaggaggctgaggtgggaggatcctttgagcccaagagatcaaggctgcagtgagccatgtttgcaccactgcactccagcctgggcaacaaaacaagactctgtctcaaaaaaaaaaaaaaaaaaaaaaaaaggcagggatggaggggggaagagaacacagcccagttttaggtggagctgaggtggtggcccagccaggacaagtgaagagtcttcagaggctgggtttggagggccgtgcatattccggaggtactgctttcatacttaaatgttttcttgtaaaactcacacctgtaatcccagcactttgggaggccaaggtgggcggatcatctgaggtcgggggttcaagaccaacctgaccaacatggagaaaccccgtctactaaaaatacaaaaaattagccaggtgtggtgacacatgcctgtaatcccagctactcgggaggctgaggtaggagaattgcttgaacctgggaggcggaagttgtggtgagctgagatcgtgccattacacttcagcctgggcaacaagagcaaaactccatctcaaacaaaactaaactaaactaaactaaagggttctatcaagaagatgggctgcacgtgatggctcacacctagactcccagcgcttcaggaggccgaggtggaaggatcacttgaggccaggagttcaagatctgcctgggcaacatagcaagaccctgtttttacccaaaaaataaaaaaattacccagatgctgtggtgtgtgcctgtagtaccagctactgagaggctgaggcaggaggaccgcttgagcctgggaggtcaaggctgcagtgagctgtgatcgtgccactgcactccagcctgggtgacacagcaagaccttgtctcaaaaataaataaaacattttaaaaacacactaggtattgcaaatacagggcatttaatttggttttttgtttctgttttgttgttgttttgagacaggtctcactctgtcacccaggctggacagcagtggcacagtcatggctcactgcagcctcaacatcccagggttgagtaatcctcccacctcagcttctcaggtagctgactatagatacacgccactacaccaagttaatttaaagaaaaaaaatgtgagaggccaggcgcagtggctcacgcctgtaatcctgacactttgggaggccgaggcaggcggatcacctgaggtcaggagttcaagaccagcctggccaacatggtgaaaccccatctctactaaaaatacaaaaattagccaggtgtggtggcaggcacctgtaatcccagctactcgggaggctgtgacagaagaatcatttgaacctgggaggcggaggttgcagttagccgagatcacgccattgcactccagcctgggtgacaagagtgaaactgcctctcaaaaaaaaagtttagaggcaaggtctcactttcttctctaggctggcctcaaactcctgggctcaagcagtctcctgggcctcccaaagtgctgggattacaggcatgagactccatgctcagccacatttaatacgagaatttttttgttttgtttttttggtttttttttttgagatggagtctcgcactgtcacccaggctagagctcagtggcacgatctccgctcactgtaagctctgccttccgggttcacaccattctcctgcctcagcctcccgagtagctgggactacaggcgcccgccaccatgcccggctaatttttttctatttttagtagagacggggtttcaccatgtgaaccaggatagtctcgatctcctgacctcatgatccacccatctcggcttcccaaagtgctgggattacaggcgtgagccactacacccagccaatacaaggaaatttttacatggctgttgaaagacagaggaaaggccaaaagtggacacttaggtaacccagagatgattgcaggagagagctaccaccctcggtggggggattgaaggggagaggtgatcacttgagttatctaatgttgcatagggaagtcacctctcaacttggttgcttaaagtaacagggatcactcattgctcatgatttctggttttttttttttttttttgagacggagtctcgctctgtcgcccaggctggagtgcagtggcacaatcttggctcactgcaagccattctcctgcctcagcctcccaagtagctaggactacaggcgcccgccaccacacctggctaattttttgtatttttagtagatacagggtttcaccgtgttagccaggatggtctcgaactcctgacctcatgatccgcccaccttggcctcccaaagtgttgagattacaggcgtgagccaccgcgcccagcttgatttctgtttgtcaagaatttgggagtcattttggtggggaatttgtatgtgggggtctctcctggggctgcagtcctttgagggtgtaactggggctgaagttcccttccaagaaccctcatatgtggctcactcacatggcgggcaatttggtgctagcagttgattctacagagaaaaacgggcttgagccaatgtgctacaagccaatactatgacaccaggcttttggttttttgtttttatgatttatgtatgtattttttttttttttgagacagaatctcattctatcaccctggctgcagtgcagtggcacaatctcggctcactgcaagctccacctcccaggttaaagggattctcgtgcctcagcctccctagtagctgggactacaggcgtgcaccaccatgcctggctaatttttgtacctttagtagagacagggtttcactatgttggccagactggtctcaaactcccgacctcaagtgatccacctgcctcagcctctcaaagtgctgggattacaggtgcaggcaaccatgactggccgttttttttgtttttaaagttggggtctcactatgttgtcccggctggtcttgaactccaaggctcaagtgatcctcctgcctcgacctcccaaagtgctaggcttacagtcatgagccaccatgcccagctgacaccaggcttttcagaaaagaatagctttattgcaagtcaaccagtaaggagacagaagtctagctcaaatctgtccccctgtgctggctttaaggcggtaattttattaggaaaggtttagggggtggattctgatattaggtgattggcggaagcaaaggggaggcctggaaagtgctcaggcatgcgcagttccctcttcatgttatctcatggggggcatgtgcaaattccgggggtggttagtatgtaacatgcactggaaattcgggctgtgacatcagcaagcttgttctgtgcaaactgcagttggccatattggtcccaatctatttcagccagcgtgttaatcccaccagcagatgaatttcagcatttctgcaagtcgtttctttttttatctgccatcctgcaaactggaaaatttctgctagtcactggtttctttaactctttggggcacggtttcactggtaggaggcctcagtttatcccatgggcctctccatagggctacttcagagtccccacagcagcctccagaatgaatatcccaagaaagaaaagaaaagtgccactaggggccgggtgtggtggctcacgcctgtaatcccagcactttggaagtctgaggcaggaggatcccttgagcccagaagttcaagccagcctgggcaatgtagggagacgccatctctactaaaaaaaaaaaaaaaaaagaagaagaatttaggccgggcgtggtggctcacgcctgtaatcccagcactttgggaggctgaggcaggcggatcacgaggtcaggagtttgagaccagcctggccaagatggtgaaaccctgtctctactaaaaatacaaaaattagccaggcacggtggcgggcgcctgtaatcccagctactcaggaggctgaggcaggagaattgcttcaacctgggaggcggaggttgcagtgagccaagatcgtgccactgtactccagcctgggtgacaaagcaagactccatctcaaaaaaaaaaaaaaaaaaaaaagaaagaaattagctgggtatggtggcacacacctgtggtcccagctatttgggaggccaaggcaggaggattggttgagcccagaaggtcaaggctacaatgagccagattgtaccattgcactccagcctgggcaacagagtaagacgccatctcaaaaaaagaaaagaggccaggtgcagtggatcacacctgtaatcccaacattgtgggaggccaagacaggatcccttgaggccaggagtttgagaccagcctggccaacttggcaaaaccctgtctttaccaaaaaatacaaaaataagctgggcgtggtggcccactcctgtaatcccacctacttgggaggctgaggcgggagaatcacttgaacctgggaggcagaggttacagtgagccgagactgcgctattgcactccagcctgagcgacagagcgagactccgtctcaaaaaaaaagaaaaaaattaccacaagcgcagctctgggtgcattgcttatgaattaactcctgctttgcaaggagcagctctggttcaataaaagattgctgtgtaacaccaccagcttacccttgaattctttgagtgaaaccaaaaaccctcccaggctaatccacaatttgggggcttagctatatgcctgtatcggtactaattgtcttcattattgtagctttgttgtaacttttgaagttgagaaatgtgagccttccaactttgtttttctttttctagactgttttggctatttgaagtcccttgaatttccacaagaattttttttttttaagtgccaagatctcagctcactgcaacctctgcctcccaggttcaagcaattctcccaacttagcctcccaagtagctgggactagaggcatgcaccaccatgctaatttttgtgtttttagtagagatggggtttcaccatgttgtccaggctggtctcaaactccttgcctcaagtgatccacccaccntcaggctcccaaagtgctgggattatagatgtgagccaccatgcccagcctccacatgaatttttaggatgagcttgtcaatttctgaaaacaagccagctggggatttgtttgtttagacacaagatgtcattctgtcacccagactggagtgcagtggcacaactcctagctcactgcagcctggaacccctaggctcaagtgatcctctcatctcagcctcctgagtaccagggaatacagacacatgccaccatgccctgctaattttttaatttttgtagcgacatggtctcaaactcctgcccaaccaggctgatctctttttttttttgagatggactctcactctgtcgcccaggctggagtgcagtggcgcaacctcgcctcactgcaacctctgcctcctgggttcaagcgattctcctccctcagcctcccgagtagctggtgggcatgggcgcctgccaccatgcccggctaatttttcatatttttagtagagatggggtttcaccatgttggccaggctggtctcgaactcctggcctcaagtgatcctcctgcctcagcctcccacagcactggaattacaggcatgagtcactgttcccggtccagctgaggattttgacagggattggtttatgtctatatgtgaactggggagtattggaatattgacatcgtaataatattaagtctctcaggccaggcatggtggctcacacctgtaatcccagcactttgggagctcgaggcaggtggatcaattgaggtcaggagttcaagaccagcctggccaacatggcgaaaccccgtctctgctaaaaatacaaaaattagccaggtgtggtggtgtgtgcctgtagttccagctacttgggaggccgaggcaagaggatcacttgaacctggtaggcagaggtggcagtgagcctagattgcaccactgcactccagcctgggtgaaagagcaaggctctgtctcaaaaaaaaaaaaaaaaaaaggaagaaggaggaggaggagggggagaaggagaaggggaaggaaggaggaaggaggaagaagaagaaatacctgaaactgggtaattttttttttgagaaaggatcttgctctgtttcccaggctggagtgcagtggcacaatcttggctcactgcaacaaccacctcctgggttcaagcgattctcatgcctcagcctcctgagtagctggaattgagatgtgcacaccacgcccagctaatttttatatttttagtagagacgcggtttcatcatgttggccaggctggtctcaaacccctgacctcaggtgatcaacccacctcagcctcccaagtgccgcaattacaggcgtgtgagccactgcgcccggcttcaaaagtaccatttaatggctgacaattacttgccctgaaatgtgaaacaaaattcatttactacattgtttttaagatagcacctgaccttcagtaatcggaaataatgatttcctataaataaaaaccactgcagtgcttttagtgattagtgtacatagagtttttcccctggctgtgacatcatattattaaaagcattaagcacctggaattcatgctgtagttgatttataagttacataatgtacaaagctccttttataagaatgttttgtggtcacaattacttcaaaacccaattacattcaaataatctaatagctcatgctttggcaattatagaagtgtgattttgacacatagaaattttatgaggttagcaaataaaaaacgctataaaagaggtgaacaatggttcctctgtttaaatttagagtgcagcaatatttaggtaatatttttcagttaatataatcagcctagaatatagcattgtaaatcatacagtgttttagaaatacggatctaaagaaggtaataccttttccaaattataaaattttggcaaatcaatacagtactttgtaatacaataaaactatgtttttgttggagtcatatatgactttaatcataatttccactgcaaaagcaccacctaaatactaaatcaattatgaaggcttttcatgacagtttataacagagtcagttgttttacacaaattaatatggcttttaaaaaattatataatttcttggccgggcacactggctcatgactgtaatcccagcactttgtggggctgagaccagcaaattgctgagctcaggagtttgagaccagcatggacaacatggcaagaccctgtctctaaaaataaaaatgttttaaaagctgcagagttaacacagtagagaaatcatgtgcatataaaatatgctacgtttccttctgggattggtccaaaactgctcacaaaaaacttcaaaactctactttaagaagttccaggccgggcacggtggctcacgcctgtaatcccagcactttgggaggccgaggcaggcgaatcacaaggtcaggagttcgagaccagcctggccaacatggtgaaaccccgtctctactaaaaatacaataaaaattagctcagcatagaggcgtgcgcctgtaatcccaggtactcgggaggctgaggcaggagagtcacttgaacctgggaggcggaggttgcagtaagccaagatcgcgctactgcactccagcccaggcgacagagcgagactctgtctcaggaaaaaaaaaaaaaaaagaagctccaataccaaattaaagtcgtttttcaagtattggtaaatcttccataaacagggcaacacttaatgatcaatagatcattcgactagggcttatgctggtggatctcttttgtttaaagctccaaactcagctgggcttggtgcttcacgcctgtaatcccagcactttaggaggccaaggcaggtggatcacctgaggtcagaagttcgagaccagcctggccaacatagtgaaacccccgtctgtactaaaaatacaaaaattagacaggcgtggtggcacagaaaaaaaaagtcaattatcctatttggggatttaaattatactattttttatttttttgagacagagtttcactctgtcacccagtctggagtgcagtggtacaatcttagctcactgcaacctccacctcctgagttcaagcgattctcctgcctcagcctcccgagtagctaggattacaggcaccagccaccacctggctaatttttgtattttttgtagagacggggtttcaccatgttggccaggctggtctcaaactcctggcctcaagtgatctgcctgcttcggcctcccaaagtactgggattacaggagtgagccaccacaccacctcgaccagccttttcctctataaatttaaaaaaaaaaaaaggccaggtgcggaggttcatgcccgtaatcccagcactttgggacggatcactgtaattccagctactcaggagcctgaggcaggaggatcacttgaacccaggagtcggaggttgcagtgaaccaagattgctccactgcactccagcctgggcaacagagcaagactccagctcaaaaacaaagaaaaaagaaaaaggccaggtaaggtgacttacatctgtaatcccagtactttgggaagctgaggcaggaggattgcttgagcccaggagttcaaggctacagtaagctagtaagctatgattgcaccactgtgctgcagcctgggtgacagagccagaccctgtctcatgaaaaaaaaaaaaaaaaaaaaaagaaaagaaaagaaaggaagaaaagtgccaaattgtttctcaaagcagttctagtgatttatggtctcacttgcagtatatcagattcttcgttgtccagatctttttaattttttacagactaacaggtacaatacagtatcttactgtggtactaatttgagtttccctgatttcctctatagttgagcatctttacgtgtttagtggccactcatgtttcttcagatcttctgcctgccttcctccctcccttcctcccttcctccctcccttcctcccttcctcccttcctccttcccgccctcccttccttttttttttttttttttttttttttgagacggagtcttgctctgtcgcccaggctggagtgcagtggcgggacctcagctcactacaagctccacctcccaagttaaatcgattatccggcctcagcctcctgagtagctgggactacaggcgcccgccaccacgcccagctaattttttgtattttcagtagagacagggtttcaccgtgttagccaggatggtctcgatctcctgacctcatgatccgcccacctcggcctcccaaagtgctgggattacaggcgtgagcgtgagccaccgcgcccggccccttccttctttttttttaaaaagagagacgggtgctccctttggcagcagatatactaaaaaagagagacgggaaggccaggcacagtggctcacacctgtaatcccagcactttgagaggccgaggctggtggatcacctgaggtcagaagttcgagaccagcctggccaacatggtgaaaccccatctctactaaaaatacaaaattagacgggtgtggtagtgcatgcctgtaatcccagctactcaggaggctgaggcaggagaatcaatgaacccgggaggcgaaagttgcagagagatgagattgtgccattgcattccagcctgggcaacaagagcgaaactacgtctcaaaaaaaaaaatgcataagttttgtgaacaaatatttcataattttctctactgaggtcttagactttttttttttacattttacagaatacttcatatcttctttgtctctcccctttttttttgcaatcaccttgaaaacattaagattcagatggtcctctaattttcctgtctcctgttatcctttgtggtgtgtgtgtgtgtgtgtgtgtgtgtgtgtgtgtgtgtgtgtttgagacagagtctcactctgctggacaggctgcagtagagtgatggcatctcggctcgctgcaacctccgcctcctgggctcaagtgattctcctgcttcagcctcccgagtagctgggattatcggcatgtgccaccacccctagctaatttttgtatttttagtagagacggggtttcaccatgttggccaggctggtttcaaactcttgacctcaagtgatctgcccacctcagcctcccaaactgctgggattacagacgtgagccactgcgcccagcctgttatcctttgtttttggaaggaagcatttgaaaaagagtgactctatcttgaataggggctgggtaagatgaggctgagacctgctgggctgcattcccagtaggtgagacattcttattcacaggatgagacagaaggttggcaggactggtatcacaagatacgggtcacaaagaccctgctgataaaacaggatgctgacagggcacagtggctcactcctgtaatcccagcattctgggaggctgaggcgggcaaatcacttgatgccaggagatcaagaccagcctggccaacatggtgaaaccctgtctctaccaaaaatacaaaaattacccagacatggtggcaggcacctgtactcccagctactcaggaggctgaggcaagagaattgcttgaactcgggaggcagaagttgcagtgagccaggatcgcaccactgcactccagacggggcaacagatcgagactccatcccaaaaaaaaaaaaaaaaaagaaaacaaaaacaggacgcagtaaagaagccagccccaaaacccaccaacggtgatgaaactgacctctggtcatcctcactgctcattatacactaattataatacattaccatgctaaaagacactcccaccaggactatgacagtttacaagtgccacggcaacacccggaagttaccctatatggtctaaaagaaggaagaaccctcagttctgggaaatccctgccctttcctggaaaactcatgaataacccatacttcgtttagcatagaatgaagaaataactgtaagtatactcagtcaagcagcccatgccactgctctgcctatggaggagtcattctttattcctttcctattctttttttttttttctttttcgagacagagtcccactctgttgcccaggctggagtgcagtggcacgatcttgactcactgcaacctctgcctcccaggttcaagcaattctcctgcctcagccttccgagtagctggaattacaggtatgcaccaccacacccagctaatttttgtatttttaatagagatggagtttcaccaggttggccaggctggtctcgacctcctgacctcaggtgatccacttgcctcagcctcccaaagtgctggaattacagacgtgagccactgcgcccggctattcctttattttcctgataagcttgctttcaggtcgggtgtgatggttcacatgtgtaatcccagcactttgggaggcctaagtggcaggactgcttgagcccagaaattcaagaccaaccagcgccacatagtgagtgagaccatatttctattaaaaaaaaaacgaaaacaaaaaaaacttggccaacatgacgaaaacctgcctctactaaaaaaatacaaaaattagccaggaatggtaacacatgcctgtaatcccagctactcaggaggctgaggcaggacagtcacttgaacctgggaggcagagcttgcaatgagctgagatcaagccactgcactcgagcctgggtgacagagcgagactctgtctaaaaaaaaaatacaaaataaaaaaaagaacttatttatgtaaccaaataccacctgttcacctgttccccaaaaacctgttgaaacaaaaataaataaataaatataaagaaataatttttatttatttattttattatattttgagacgaagtttcactcttgtcgcccaggctggagtgcaatggcgtggtctcagctcactgcaacctctgcctcctgggttcaagcgattctcctgcctcagcctcccgagtagctgggactacaggcacctgccaccacgcctggttaattttgtattttagtagagacagggtttcaccatgttggtcaggctggtctccagctcctgacctcaggtgatccacccgccttggcctcccaaagtgctggaattacaggtgtgagccaccacacccagcctttaattttattttctatagagaggagtcccataatattacccaagctggtctcaaactcttggcctcaataaatcctcccacctcagcctcctgagtagctaggactacaggagtgcaccaccatgcccagctaatgtttttatgttttgtagagatgagggtctcattatgttgcccaggctcgtcttgaactcctgggctcaagtgatccatcctcctgcctcagcttcccaaagtgctgggattacaggtgtgagcaaacatgcccagcctaatattattaatacatcgtagctgtccatatttatagggtgcatgtgaaattttgttacgtgcatagaagtgcgattgtaggaaccaaggaaaaaacttctgcttcaccttctcaaggtttgctgataaatcagctcacaaaaggcagattaattggaaaaagggggatacaaattgcattcacacgtatctggggagaaccacaccacagcgtgattacccaccaccccaaaggcattcagacgcttatataccatcttcttttttttttttaagtagagactgggttttcgccatgttgccaggctggtcttgaactcctgcactcaagtgatcttcccctcttggcctcccaaagtggcgctgggattaccgccatgagccactgtgcctggcactatatacatatatatagatatgtatacatatctatatctatagatatctatatatctatagatatctatatatctatatctatatgtatacatatctatatatatagacatgtgtatatatatctatagatatctatatctatagatatagatatactatcttgcagatacagaaagaataggggtttggatcctggtaaaacaggttatggcagggggaagaaagaggaattctattgaggggacataaaagattactgggggctaggcagagtggctcatgcctgtaatcctagcactttgggaggccaaggtgggcagatcacttgaggtcaggagttcgagaccagcctggccaacatggcgaaaccctgtctctactcaaaacacaaaaattagccagtcatggtggcacatagctgaaatcccagctactcaggaggctgaggcaggagaatcacttgaacccaggaggaggaagttgcagtgagctgagatggcatcactgcactccagcctgggtgacagagtgagactccatctcaataaaaataaaaataaaaataaagcattgctggggagaatgaatggatttaggaacagagattaacttgtacataattctctttggaatttcaatgagcctgagggagacattatcttgcggaagagtctgttcaggtgtggttccattcttgattttatagaaaggagaagaaaaaaaaacaattgttttccttgttgaggggggatgtctggatcttaggcagagaaagtaacttcaacttcatcctgtgctgtgggagaaaagacggtcttttagacacagtttatcgttactgctgcttttcctgtgtttggcctataccttcctgcctctttgaatgatgggtagaccagagtttgtgagtcaatttgtattagctgtgtgatctggagcaagctactgttgtcagaggagtttgaaccacagtgattccatcttgaatagggggtgggtaaaatgaggctgagacctgctgatattgacaggaggcagccaattgcctaggccaataggggcgggtccgcggtgaaaccccacctccaacccgaagacggtttaaagcctgaaactgaaggtacaagtttaaaccttagaccggattgagagcttaccttcctgtttgtcgcgctttcctctgattgatccccacccttcgcctattttacatatacccaccctttcctaattggttttctactctttctttttttttttgacagagtctcgctctgtcacccaggctggagtgcagtggtgcaatctcggctcactgcaatctccaccccccgggttcatgtcattctcctgcctcagcctccccagtagctgggactacaggcgcctgctaccacgcccggctaattttttgtattttttagtagagatgaggtttcaccgtgttagccaggatggcctcaatctcctgaccttgtgatctgcccgccttggcctcccaaagtgctggcattacaggcatgagccaccgtgcccggcggttttctactctttcatgaccacctttgagtagtgtctttgctttaactcacctcattagcataaactccagtgtgatcaaaaggactcattataaataacaaaagacattcctccaactcctggacttaagggatccctcaagcaagcctcagcctcctgaatagctgggactactcctttttgcatactcacaagccaatcagcacacactccccaccctgtgcctataaaggctccagactcagtcagcaggggaaaagacgacctgacttcggggaaggcaacctgcacttcccatcccctctccagctcccctctccactgagagtcgctttcattgctcaataaaattctccaccttcatcatccttcaatcgtccgtgtaacttcattcttcctggatgctggacaagagcttgggacccagtgagtgaggatacccagaaaggctgtcacactgggcctttgccctcgcctgtgaagggcagctgtccccatgtgatgaggcaaggggccagctgatctgctgacatgtcaccatctgtggacagcagaactaaaggagcactgtaataacaccctctctgcagcttcggggacacgggcaccctcacctaggtgctgctgctttcccctcaaggtgacgtgcctgctctggccatgggccctgcatacagcttgctcctgtgttggtgcctggagaagccagctggccagatcccacacttagtcacttgtgtgctccctcctgcaaggggttgagcacagggggctgagtagatggggcatcccttccatgagtccagcgaaggtgcctagaaaaaccctgcatcaccactgagctactttcccaggaggtgaggcattcccagtcacaggatgacacaggagggtggcacaagacataggtgacaaaaaaccttgctgataaaacaggttgcagcaaagaagccggccaaaacccaccaaaaccaaggtggcgatgaaagtgacctctggtaggctgggtgcggtggctcaacgcctataatcccagcactttgggaggcccaggcgggcggatcacctgaggccaggagtttgagaccagcctgaccaacatggagaaactccgtctctactaaaaatacaaaaaattagctgggcgtggtggcacatgcctgtaatcccagctactcaggaggctgaggcaggagaattgcttgaacccgggaggcggaggttgcagtgagccaagatcgtgccattgcattctagcctggatgacaagagtgaaactccatctcaaaaaatagaaagaaagtgacctctggtcgtcctcactgctcattatgtgctaattataatatattagcatgctaaagacactcccatcagtgccatgacagtttagaaatgccgtggcaacatcaggaagttaccctatattgtctaaaaaggggaggaaccggccgggcgcagtggctcatgcctgtaatcccagcactttgggaggccaaggcaggtggattgcaaggtcaagagttcaagaccagcctggccaagatgtgaaaccctgtctctactaaaaatacaaaaattagctgggcatggtggcgggcgcctgtaatcccagctactccagaggctgaggcaggagaattgcttggacccaggaggcagaggtagcagtgagctgagattgcaccattgcactccagcctgggtggcagagcaagactctgtctcaaaaaaaagtggggaggaaccctcagttccaggaattgcccgtgcctttcccagaaaattcatgaataatccacccttgttgggcatgtaatcaagagataactataaaaaatatccagccagcaaccttaggggatgctctgcctatggagtagacattctttgttcctttactttctttttttttttttttttttgtgagatggagtctcactttgtcatccaggctggagtgcagtggtgcaatcttggctcactgcaacctctacctccccagctcaagcgattctcctgcctcagcctcccaagtagctgggattacaggcgtatgtcaccacgcccagctagtttttgtattttttagtggagacagggtttcaccatgttggctagtctggtcttgaactcccaatctcaaatgatccgcccaccttggcctatcaaagtgctgggattacaggtgtgagccactgtgcccagcctattcctttactttcttaatatacttgcttccactttactccatggactcgcctggaattgtttcttgcgtgagattcaagaactctctcttggctgggtgtggtggctcacgcctgtaatcccagcactttgggaggccgaggcaggtggatcatgaggtcaggagtttgagaccagcctgaccaacatggggaaaccctgtctctactaaaaatacaagaaaattagccgggcgtggtggcacgtgcctgtaatcccagctactcaggaggctgaggcaggagaatcacttgaacccgggaggcagagggcgccactgcagtccagcttgggcaatagagtgagaccctgtctcaaaaaaaaaaaaaaaaaaaaaaagattaaaaaagaaccctctcttggggtcttgattgggactcctttccagtaacagtgtgaaagaaaaataaaatcaccagaccccaaactcactatgtcaaagggcaaaaagctaagcttaggaactgagtcatacaggaaactgcattttcttttgttcctaaccagatagctgcaagattgaatgccacgtatctccacaggtggcttccctcaccctgaccatgtaaattcagcttaccttcacaggtacaggacaaataaaaaaatagaaatctggccaggcatgggggctcacacctgtaattccaacactttgggaggctggggtgagagaattgctggagctcaggggttggagatcaccctgggcaacccagtgagaggctgtctctacggaaaagattttaaattagcctggtgtggtagtgcacacctgtagtaccagctactcaggaggctgcattgggagtattgcttaagctcaggaggtcgaggctctagtgaggtgtgatcgcaccgctgcactccaacctgagcaacagaataagaccctgtctcaaaaaaaaaaaaaaaaaaaaaaaatcatggccgggcgtggtggctcacggctgtaatcccaacactttgagaggccaagggatcacctgaggtcacgagttcgtgaccagcctgaccaacatggtgaaaccccgtctctactatagacaaaaaattagacaggcatggtggcacatgcctgtaattccagctacttgggaagctgaggcaagagaatcacttgagctgaggcggcagaggttgcagtgagccaagattgcaccattgcattccagcctgggccacaagagtgaaactctgtctcaaaaaaataacaataatttttttttttttttgaggtggagtcttgccctgtcacccaggctggaatgcagtggcacgaccttggctcactgcaagctccgcctcccgggttcacgccattctcctgccccagcctcccgagtagctgggactacaggcgcctgccaccacgcccggctaaatgttttgtatttttagtagagacagggtttcaccatgttagccaggatggtctcaatctcctgatctcatcatccgtccgcctaggcctcccaaagtgctgggattacaggtgtgagccaccgcgtccggccaatatttttcttttttttaaatcatacttccaggtccnggtgcggtggctcacacctgtaatcccagcnctttaggaggctgaggtaggcagatcacaaggtcaggagttcgagaccagcctggctaacatggtgaaaccctgtctgtactaaaaactacaaaaattagctgggcgtggtggcacacacctgtaatgctagctactcaggaggctgaggcaggagaattgcttgagcccgggaggcggaggttgcagtgagctgagatcacactactgcactcctgcctgggggacaaagtgagactctgtctcagaaaaaaataataataataaatcatacttacccccaccctaagacaaaagcataattgacttcttcctctactctgtgtttactttatcttgtgtaaaatacagatatatttagcacaagatgaattcataatagactgttcctttttccctcctttcacatgtgttaaaagaaaaacttcagccaaattaaatttaagggagtttaattgagcaatgaacaatttgtgaatcgggcagcccccagaatcacagccgattcagacagactccagtgcagccatgtgatggaagaagatttatagacaaagggaaatgacatacagaagtcagtgaggtacaaaaacaactggattggctacaggtcggcatttgccttatttgaatatggctcaaacagttggctacatctgactggccaaaactcagtgattggcacagggtgtgggctatggccgagttatacctccgcttgttacagttcacaatgtacagaaaaacctttaggccaaattgaaatatgtaaagaagcagctttaggctaaacttgattaacgtatgtaagatgtggattcagtgatcatgaatgaaagcctcacagaaagtgaccacttatttcactaccttccctagtgtttttgttgttgttgtttgttttgttttgttttgttttttgagatggagtctcactatatcatccaggctggagtgcagtgaagcgatcttggctcactgcaagctccgcctcccgggttcacgccattctcctgcctcagcctcctgagtagctgggactacaggcgtccgtgaccacgcccggctaatttttttgtatttttagtacagacggggtttcactccgtgttagccaggatggtctcgatctcctgacctcgtgatctgcccacctcggcctcccaatgtgctgggattacaggcgtgagccaccgcacccggccaccttccctcctttttcatttctttcctccttcccctcctgcccactctttctcctttaaatattgaagtcctcaaaactctctggaaaagccatgggtcacagatttttctttggcttgggtctctttttcctgggcatgtcctcaaccttagcaaaataaacctctaaattcattgagtcccctcctctcccctcccctcctcttcccttcccttcccttcccctttctttgagacagggtctcactctgtcatccaggccagggtacagtggtgcaaatgatagggacaagaggcagggaaattctgggcagaagagggtgggtccccagagagggcattgccctcaagctgaaaaacctggaactgcagcccaaagtgagaactgacatccctgttttttgttttttggttttttttgagatggagtctccccttctgtcacccaggctggagtacaatggtgcgattttggctcactgcaacctccacctcccgggttcaagtgattctcctgcctcagcctcccgagtaatccgagccgggattacaggcacacaccaccacacccggctaatttttgtatttttattagagaaggggtttcactatcttggccaggctggtgttgaactcctgatttcgtgatccaccctccttgcctcccaaagtgctgggattacaggcatgagccaccgtgcccagccaacatcgctgctttcctgcttgaatgttgccttttccaaaaccacccttgacctgccctgcccccaatcctgtgcccataaaaaccccaggcccagctagcagagagaggagaagcagctggacgtcaaagaccatggttgaacattggagagaagtggcttgacttcagagggacagtttgctggagtagctttggaggagtatggccagggacagctggacttcagagaaagattaccttcctgctctgtccccttttcagctccccttcccgcttagagccactttcatcagcaataaagtctcctgcatttaccatcttcaattcatttgtgtgacctaattcctcctggacactgaaaaagaacttgggtgccacgagtgtggatgcaaaaggctgtcacaccgatcctccactaagctgttaacacttaagccattcacagacagcagagctaaaagagtactctaacactgcctctggggcttcaatagtctccggcaccctccgctagacactatcatggggctggtatggagatggctcttgctggcgcctaaaaactctcgccccgtctcctgcacctgctcacctgtgctccctctcctgtgaggggtggagtagtgagtgagtggagttcacccctaccagcaccaaagcagctggctagttcttaggcaacatcctgcttcacaatcacagctcactgcaacctcccacctcccaggctcaagtgttcctcctgcctcagcctcccaaagtgctgggattgcaggcatgagccaccatgcccagccagtcattttctttggtttacactactttacctccctgagccttattttccccaaatgagaggtagaaactcctctgttgggaggattaaatgagatatgtctcaaatttttgttgaaaactggacattttattttatcttattttacttatttttgagacaaggtctcactcactctgtcactcaggctagagtgcagtggtgcaatcttggctccctgaaagcttaacctcctgggctcaagtgatcctcctgtctcagcctcctgagcagctgggactataggctccagccaccacacttggctaatttatttttatttttattttttgtagagacagagtctcactatgttgcctaggatggtctggaactcctgggctcaagtggttctcctgactcggccccacaaagtgctggcattacaggtgtgagccatggcacccagcaaaaactggacattttaaatcatgtattgtaattctaaattctgatgtcctggtggtagctgttgtagattttgacattgttgttgtttgctggttgtctgtttggttgtttaataacttgaagccactaaaggaagcctctgttttgttttgtgattcttgcttttattttcaagactggcttcctaggggtccatctctgaatcagcattgcttagtgcccagccactgtttggtcagaaggtttccgtaaacaccttgacacactaagccttccttggtcaagaggacctgtgaggggggttgggacacaggttaaattatttcctcaagggcgttgacatttctttcttttttcttttttttttgagatggagtctgtctctatcactcaggctggagtgcagtagcatgatcttggctcactgcaacctctacctcccaggttcaagcgattctcctgcctcagcctcccgagtagctgggattacaggcgcccgccaccacacccaactaatttttgtattttagtagagatggggtttcaccaccatgttggccaggctggtctggaaccctcgacttcaagtgatccacctgcctcagcctcccagagtttgggattacaggtgtgagccaccacacctggcctctttttttcttttcttttctttttttttttttttgagatggagtttcgctcttgttgcccaggctggagggcaatggcatgatctcggctcactgcaacctctggctcccgggtacgagcaattctcctgcctcagcctcccaagtagctgggactatagacatgcgccacacgcctaattgtttgtatttttagtagagatggggtttcaccatgttgaccaggcaggtctcgaactcctgacctcaggagatctgctcacctcagcctcccacaggtatgagccaccatgctcagctttattttgttttattttattttattttattttattttattttatttgagacagagtctcgctctgtcgcccaggctggagtccagtggagctatctcggctcactgcaacctctgcctctcaggttcaagcaattctcatgtctcagtctctcaagtagctgggattacaggtgtgtgccaccacgcccagataatttttttattattagttttagtagagtcggggttttgccatgttgcccagcctggtcttgtactcctgacctcaagatatccacccgcctcggcctcccaaagtgctgggattataggcatgagccaccatacccggcctctttttttaatttttatggatatgtggtaggtatatgtatttatgaggtacatgagatattttgatacaggcatacaatgcatcataatcacatcagagtaaatggggtatccatcatctcaaacatttatcatttctttgttacaaacattccaattatgctcttctagttatttttaattgcataataaattattgttgactgcccaggcacagtggctcacgcctgtaatcccagcactttgggaggccgaggcaggtggattgcctgaagtcaggagttcaagaccagcctgaacaacatggagaaatcccgtctctactaaaaatacaaaattagccaggtgcagtggcgcatgcctgtaatcccagctacttgggaggatgaggtaggagaatctcttgaacccaggagacagaggttgcggtgagccgagatcgcaccattgcattccagcctgggcgacattttgtatgacattgcttaaccataaactcttcatttgcttttgtttttcttttctttttttttgagacggagtctcgctctgttgcccacgggttccaccgtgttagccaggatggtctcgatctcttgaccttgtgatccgccagcctcggcctcccaaagtgctgggattacaggtatgagccaccacccacggcctgtttttcattttattgtctgagaatcccttgcagcctgggggcatagattcggggaattctcccactcctcactttcttttcttccttaggaatatcttggccaggtgcagtggcttacacctgaaatcccagaactttggcaagctaaggcaggaggaatgcttgaggtcaggagtttgagacccgcctggggaacaaagtgagatcctatctctatttaaaaaataagaataatggccagtcttgggggatcactcctgtaatcccagaactttggaaggcagaggtgggaggatcacttgaacccacaaggttgaggctgcagtgagacgagattgttctgccacactccagcctgggtggcagagtgagaccctgtctcaaaacaacaacaacaattaaaaaaaaaaaaaaaagaatatctttatttctgacttgggggcttgcaggtggctgaactatttctgtggaatgatctggaaacccacacatatgtgaagccaggtcagggctttgaattctttgaattatcaggctgaggcaggcaagtttgtcactcctcaaggtagatgaactcatgatctccagtctaccctttcacagactgtgtggcttttcaaggatcacatttcaaagggatctcaggcacaatttccatttgaactgggtccagatacaatttccatttgaactggacctcaatgtagtagtctctcattgtttgaagtatcactcggagttctttgtctcacaaccatgaaaattaaggagcatgggcaccaaggatgaggctggagtgaaagtttaataagctaaagaagaaagctctctgccgtggagagggggtctgaaagaggccattattatttatttatttatttgagacagagtttcactcttgttgcccaggctggagtgcaatggcatgatctcggctcaccacaacctccacctcccgggttcaagtgattctcctgcctcagcctcctgagtagctgggattataggcatgcaccaccacacccagttaattttgtattttcagtagagacggggtttctccatgttggtcaggctagtgtcgaactctcctcaggagatccacccacctcggcctcccaaagtactgggattacaggcatgagccaccgtgcccagccaaaagaggccatttttacagttgaatgcaaaagcttttataagaaaccaatgagggctgggcatttcatttacataaggtgtgaatttctcctatctccaccccatccttctaatgcgcatgggggcccttagcttaatttactccatattgctttaatttttttttaaattagccatattttgcaaaaaaaaaaaaaaaagtgcatacatcctataatgtcctattttatctagtaactctagcctagggcctcatctcctgacctgacacgggcattaaagcaagctcctggccactgaccctcagtgaccattcagagcagagacgtgatcaattcattgcctatcatctgtggcgtttagtttcctctttgtttctggattcctaggatttccctttctttcatgggagctcaactgggcattgaaaataattttttttaattgtattaaacatttcaaagagtttcaataggaaggttttctggttctccctgcctggcaaatcagaaacatatggagaggtttttcagtacatgtttcatagcccttctttctctgccaaaattctgatatagccccctggagaacaacaaaatctggatggagtttgggccagaattggggtggggtatagattggctcctatgtgcttggaaaataactcacaacccactttcccagtgttgattcaattctttgtgtcttagacattttttctcattttgttttgtttgagacagggtctcgctctgtcacccaggctggagtacagtggcacaatcttagctcactgtagtcttggcacccccgggctcaagccatcctcctgcctcagcctcccacatagctgggactacagatgcgcaccaccatgcccggctaagtcttttttttttttttttttttttttgagacggagtctcgctctgtcacccaggctggagtgcagtggcgtgatctcggctcactgcaagctccgcctcccaggttcacgccattctcctgcctcagcctccagagtagctgctgggactacaggtgcccactaccacacccgactaattttttgtatttttagtagagatggggtttcaccatgttggccaggatggtctcgatctcttgacctcgtgatccacccgcctcggcctcccaaagtgctgggattacaggcgtgagccaccacgcccggccaattttttgtatttttagtacagacagggtttcaccatgttagccaggttggtcttgatctcccgaccttgtgatccgcccgtcttggcctcccaaagtgctgggattacaggtgtgagccagcacgcccggccctggctaagtcttagacttttgtttccccaacgtctaacacagtttcatggcccatagaagatactgagtgcatgaatgaggaatgcacgaatgactcttggcagacacttcgtggtcagcataaaagagggagaaagctggctgggcaaagtggctcacacctgcaatcccagcactttgggaggccgaggccagtggatc

SEQ ID NO: 181 - DNA, 5190 bp, Homo sapiens
  misc_feature (1)...(5190): n=a,t,g or c
gcctgtcctactgccgccggcgccgcggccgtcatggggttcctgaaactgattgagattgagaactttaagtcgtacaagggtcgacagattatcggaccatttcagaggttcaccgccatcattggacccaatggctctggtaagtcaaatctcatggatgccatcagctttgtgctaggtgaaaaaaccagcaacctgcgggtaaagaccctgcgggacctgatccatggagctcctgtgggcaagccagctgccaaccgggcctttgtcagcatggtctactctgaggagggtgctgaggaccgtacctttgcccgtgtcattgtaggaggttcttctgagtacaagatcaacaacaaagtggtccaactacatgagtacagtgaggaattagagaagttgggcattctcatcaaagctcgtaacttcctcgttttccagggtgctgtggaatctattgccatgaagaaccccaaagagaggacagctctatttgaagagattagtcgttctggggacgtggcgcaggagtatgacaagcgaaagaaggaaatggtgaaggctgaagaggacacacagtttaattaccatcgcaagaaaaatattgcggctgaacgcaaggaagcaaagcaggagaaagaagaggctgaccggtaccagcgcctgaaggatgaggtagtacgggctcaggtacagctgcagctctttaagctttaccataatgaagtggaaattgagaagctcaacaaggaactggcctcaaagaacaaggagatcgagaaggacaagaagcgtatggacaaggtggaggatgaactgaaggagaagaagaaggagctgggcaaaatgatgcgggagcagcagcagattgagaaggagatcaaggagaaggactcagaattgaaccagaagcggcctcagtacatcaaagccaaggagaacacctcccacaaaatcaagaagctggaagcagccaagaagtctctgcagaatgctcagaagcactacaagaagcgtaaaggtgacatggatgagctggagaaggagatgctgtcagtggagaaggctcggcaggagtttgaagaacggatggaagaagagagtcagagtcagggcagagatttgacgttggaggagaatcaggtgaagaaataccaccggttgaaagaagaagccagcaagagagcagctaccctggcccaggagctggagaaattcaatcgagaccagaaagctgaccaggaccgtctggatctggaagaacggaagaaagtagagacagaggccaagatcaagcaaaagctgcgggaaattgaagagaatcagaagcggattgagaaactggaggaatacatcaccactagcaagcagtccctagaagagcagaagaagctagagggggagctgacagaggaggtggagatggccaagcggcgtattgatgaaatcaataaggagctgaaccaggtgatggagcagctaggggatgcccgcatcgaccgccaggagagcagccgccagcagcgaaaggcagagataatggaaagcatcaagcgcctttaccctggctctgtgtacggccgcctcattgacctatgccagcccacacaaaagaagtatcagattgctgtaaccaaggttttgggcaagaacatggatgccattattgtggactcggagaagacaggccgggactgtattcagtatatcaaggagcagcgtggggagcctgagaccttcttgcctcttgactacctggaggtgaagcctacagatgagaaactccgggagctgaagggggccaagctagtgattgatgtgattcgctatgagccacctcatatcaaaaaggccctgcagtatgcttgtggcaatgcccttgtctgtgacaacgtggaagatgcccgccgcattgcctttggaggccaccagcgccacaagacagtggcactggatggaaccctattccagaagtcaggagtgatctctggtggggccagtgacctgaaggccaaggcacggcgctgggatgagaaagcagtagacaagttgaaagagaagaaggagcgcttgacagaggagctgaaagagcagatgaaggcaaaacggaaagaggcagagctgcgtcaggtgcagtctcaggcccatggactgcagatgcggctcaagtactcccagagtgacctagaacagaccaagacacgacatctagccctgaatctgcaggaaaaatccaagctggagagtgagctagccaactttgggcctcgcattaatgatatcaagaggatcattcagagccgagagagggaaatgaaagacttgaaggagaagatgaaccaggtagaggatgaggtgtttgaagagttttgtcgggagattggtgtgcgcaacatccgggagtttgaggaagaaaaggtgaaacggcagaatgaaatcgccaagaagcgtttggagtttgagaatcagaagactcgcttgggcattcagttggattttgaaaagaaccaactgaaggaggaccaagataaagtacacatgtgggagcagacagtgaaaaaagatgaaaatgagatagaaaagctcaaaaaggaggaacaaagacacatgaagatcatagatgagaccatggctcagctacaagacctgaagaatcagcatctggccaagaagtcggaagtgaatgacaagaatcatgagatggaggagattcgtaagaaactcgggggcgccaacaaggaaatgacccatttacagaaggaggtgacagccattgagaccaagcttgaacagaagcgcagtgaccgtcacaacttgctacaggcctgtaagatgcaggacattaagttgccactgtcaaaaggcaccatggatgatattagtcaggaagagggtagctcccagggggaggactcagtgagtggttcacagagaatttccagtatctatgcacgagaggccctcattgagattgactacggtgatctgtgtgaggatctgaaggatgcccaggctgaggaagagatcaagcaagagatgaacacactgcagcagaagctgaatgagcagcagagtgtgcttcagcgtattgccgcccccaacatgaaggccatggaaaagctggaaagtgtccgagacaagttccaggagacctcagatgagtttgaagcagcccgaaagcgagcaaagaaggccaagcaggcattcgaacagatcaagaaggagcgctttgaccgcttcaatgcttgttttgaatctgtggctaccaacattgatgagatctataaggccctgtcccgcaatagcagtgcccaggcattcctgggccctgagaaccctgaagagccctacttggatggcatcaactacaactgtgtggctcctgggaaacgcttccggcctatggacaacttgtcaggcggggagaagacagtggcagctctggccctgctctttgccatccacagctacaagccagcccccttcttcgtcctggatgagattgatgctgccttggataacaccaacattggcaaggtggcaaattacatcaaggagcagtcgacttgcaacttccaggccatcgtcatctctctcaaggaggagttctacaccaaggccgagagcctcattggagtctatcctgagcaaggggactgtgtgatcagcaaagtcctgaccttcgacctcaccaagtacccagatgccaaccccaaccccaatgagcagtagcagtatttttgccctcccgccctgtctggatccctaagctgtccctctcccaatctctggatatttgactcccaaccttccccctacctcctggccctttttggtgtagtcatgggatttaggcactgctaatcaagcatgaagaggaacagaggtgatgttaggtctggagcaaaaattcctgaacgacagggagtattctggcctctgaaaggaggtgctgagctgaacagggccatctgtncatcacacacacccnnttctccctcatcacccataatcgtggnccccttggctcttgcccactgtgtgtgtgggtatgtatgtgtgtatgtatgtatccgcatgtgtgcatgtgagtatgtttgcaaaataataaaggatattggagacctgttttagaaggagcctaggctgaatttgattccaagagagcttaggatgacagcacccctgagctgggcaaaggtactcaggacctcataggagtcttaggcagttacctgaaactgccttcattcactcatttgtgtattcattcatttatgtattcatcagacacataccgaacaccctctatttgtcaggctctgtgcttggaatacagagttgaatcagacatgatctctaccctcctagtaaggagatacagtgggttcatgaatgactatagttagctgaatgtcatatgtacnnttnnngaatttgagaagtggntgatcccctctaggcttcctggaggtcacatttaagctagaccttgacaaattggtaggatttggtcaggcactaggagtggagcatgagctctggggacagacagttatgggttctggtcccactttttatcacttactagttgtttgaccttgggcaagtcatttgaccttctgtgcctcagtttcctcatctgtaaaatggggctaacaatattacctacctcataggatttaatgatgtcaagctcctcactgnagnccttatnccnttcgtgnagcccactaggtgccgacccctcagaatataatcctcatgcctgacccctgagagcttctgatcccagctattaggacagaagaagcctccaaatctggaaggtgctgaatgccctgctgactgggaaagtttcagggcactgatggggtctacctggtaagcggagggcctgaggaaacctgtagcttcaatcatgtctggtaaccgggtgcctgagccccaatctgggttgtgaggaaataggggagaggtatcctgggccacatcccagcctaacacctgtgaggttcattttaggaactaacctcattagctataaggatcatgcagaggcagcaaagccgggtgcgatgagctcagcctttactcattcacatacaccatcacactttaattccaatctgtatattgctttttaaaagttaagtccattctaatnncccaaatatgcatgaattc

SEQ ID NO: 182 - DNA, 4068 bp, Homo sapiens
aacagacacagactcgcaggccctcttcattctaaagcaagggtccaaaaccttttttctataaagggccagagagtaaataatttaggctttgtgagccaggcagtctgttgcagctacgcagtccttggttattatagtgcaaaaacagccataggcagcatgtacagaaatgagcataaccatgctccaacaaaactttatttacaggcactaatgtttaaatttcaggtaattttcacatgtcacaaaatatcacttttctttaaccacttaaaagtataaaagccattcttagtttgcaggcagtacagaaacagtttcagcccatgggctgtcatttgttgacccctattcaagagggtctgtcacagaagactcctgcttgcctgaaatttacgagtgcatgtaaatgttggaattaacaggtgtgcctgttttctcttatgctgtctttcatcttcaggaacagccaggaagacgctgcacttcgagatttccaaggaaggcagtgacctgtcagtggtggagcgtgcagaagtctggctcttcctaaaagtccccaaggccaacaggaccaggaccaaagtcaccatccgcctcttccagcagcagaagcacccgcagggcagcttggacacaggggaagaggccgaggaagtgggcttaaagggggagaggagtgaactgttgctctctgaaaaagtagtagacgctcggaagagcacctggcatgtcttccctgtctccagcagcatccagcggttgctggaccagggcaagagctccctggacgttcggattgcctgtgagcagtgccaggagagtggcgccagcttggttctcctgggcaagaagaagaagaaagaagaggagggggaagggaaaaagaagggcggaggtgaaggtggggcaggagcagatgaggaaaaggagcagtcgcacagacctttcctcatgctgcaggcccggcagtctgaagaccaccctcatcgccggcgtcggcggggcttggagtgtgatggcaaggtcaacatctgctgtaagaaacagttctttgtcagtttcaaggacatcggctggaatgactggatcattgctccctctggctatcatgccaactactgcgagggtgagtgcccgagccatatagcaggcacgtccgggtcctcactgtccttccactcaacagtcatcaaccactaccgcatgcggggccatagcccctttgccaacctcaaatcgtgctgtgtgcccaccaagctgagacccatgtccatgttgtactatgatgatggtcaaaacatcatcaaaaaggacattcagaacatgatcgtggaggagtgtgggtgctcatagagttgcccagcccagggggaaagggagcaagagttgtccagagaagacagtggcaaaatgaagaaatttttaaggtttctgagttaaccagaaaaatagaaattaaaaacaaaacaaaaaaaaaaacaaaaaaaaacaaaagtaaattaaaaacaaaacctgatgaaacagatgaaggaagatgtggaaaaaatccttagccagggctcagagatgaagcagtgaaagagacaggaattgggagggaaagggagaatggtgtaccctttatttcttctgaaatcacactgatgacatcagttgtttaaacggggtattgtcctttccccccttgaggttcccttgtgagccttgaatcaaccaatctagtctgcagtagtgtggactagaacaacccaaatagcatctagaaagccatgagtttgaaagggcccatcacaggcactttcctacccaattacccaggtcataaggtatgtctgtgtgacacttatctctgtgtatatcagcatacacacacacacacacacacacacacacaggcatttccacacattacatatatacacatactggtaaaagaacaatcgtgtgcaggtggtcacacttcctttttctgtaccacttttgcaacaaaacaaaacaaacaacattaaaaaattgagaacaagtatggaaagaatgaaagatcaaggaaaaaagaataccaagttacatttcgttaaggtgcttatgatcttagaactatgcaacctaataggtttgaaactgtttacctgagagagaacaaaaagagagacttttttgtattggaagtaatctgattaatttttattttcttcaaggagagatacttgaaaggaatatgtttgtccatctgttggatccaaacatttctatattttgtaaatgttgttgttgttttttttttaatcgtttactatttgcactacaatggtgtttgacctgtctaatccttatttaacaagtattttctttggttgggggtgggggtggggtttaagagctgcacttaatgtgagctataaaagaactgctacagcacacaaaatagctatttttattattataattataattattattattattttgtaccttaaaaaatagacacatacaccaaagacatttgtgtgagcctttaaacagtctgtctgtggttggtatcattcaccatcaatgagtcaggggttgggattcaaggttgagtagtgtggattgtgttcaggcttaaaagacctgagaagtttggtttttgactccttttacatccatgaaacaggacatttcatactggatgtacagtagttgtacactgttggatatcaagttcaatcaaattcatggaactacatgcttgtatgtgtatatatacattgcttgtgcatatgcatatctgtatgtatatatacatgtattgtaccatgtccatacacattttaagcacttcaggctgtcattttttaatgttcttaaagcaatgaatgtttgtgtgcaaaacacagtatttttaagaaggataggctatagtttttgcttttactctgaactaggtgggcgcatttcaaaaattcggatgggaaaaagcctggaaattccagtgaatattcagcaaggccctctttcattgtacagggatcaaatttcctcctcttttttgtgccccctcccacttctacaagttatcccctgtggggaaaacaggatgataatcaaaactctgggctgatgtttttccaacttagtgtctattggaatcaatcttaaatcagaagctttttcagaaaaataatatttaggccagaattagagttgagtgtattttttaaaaatgattaaggcttggttgtgagaaatattacctgtaccagctgggaaaaataatgtcatcactaactaaaagataattaatttgagagaaagtgttaagagagggagagtaaggaagagaacagttaagaggaggcagaggtgagggcagtagtaaaaatctctaaaattttaatttacagccaaaattcttcatgtgtaaatttgtattgattcagatgcagaaatgaaaaaaaaacacctttgttttataaatatcaaagtacatgcttaaagccaagtttttatctagtttattctagtacttagcttgcctggaatagctaataaattattcatgtatgtgcttttgaaaatccagagccctatttttacacacttgtgtgaagttggcaaacattttgaaaaatggaaaaaagtttctaataattgggaacaattacattaattaatattttgtaaaatattgaagcttttagccctatgtcaatttgtagattaaaataaattaattataggaaaggaagataacagtgagaaaccaaacattacaaaaggtggtttagctctccttgaaaaatatactaagttggtatactataacacttggctatatgtaggcaatgtcactactgggcaaatacacttactgtgttctagaggcagccctttcttatgcagaaaatacaatacgcactgcatgagaagcttgagagtggattctaatccaggtctgtcgaccttggatatcatgcatgtgggaaggtgggtgtggtgagaaaagttttaaggcaagagtagatggccatgttcaactttacaaaatttcttggaaaactggcagtattttgaactgca

SEQ ID NO: 183 - DNA, 696 bp, Homo sapiens
ttccccccccccccccccccccccgcccgagcacaggacacagctgggttctgaagcttctgagttctgcagcctcacctctgagaaaacctcttttccaccaataccatgaagctctgcgtgactgtcctgtctctcctcatgctagtagctgccttctgctctccagcgctctcagcaccaatgggctcagaccctcccaccgcctgctgcttttcttacaccgcgaggaagcttcctcgcaactttgtggtagattactatgagaccagcagcctctgctcccagccagctgtggtattccaaaccaaaagaagcaagcaagtctgtgctgatcccagtgaatcctgggtccaggagtacgtgtatgacctggaactgaactgagctgctcagagacaggaagtcttcagggaaggtcacctgagcccggatgcttctccatgagacacatctcctccatactcaggactcctctccgcagttcctgtcccttctcttaatttaatcttttttatgtgccgtgttattgtattaggtgtcatttccattatttatattagtttagccaaaggataagtgtcctatggggatggtccactgtcactgtttctctgctgttgcaaatacatggataacacatttgattctgtgtgttttccataataaaactttaaaataaaatgcagacagtta

SEQ ID NO: 184 - DNA, 860 bp, Homo sapiens
gactctcactgtcattgcagaaaactcttctacagaaattactctcaaagaaacctgaggatcgacctaacacatctgaaatactaaggaccttgactgtgtggaagaaaagcccagagaaaaatgaacgacacacatgttagagcccttctgaaaaagtatcctgcttctgatatgcagttttccttaaattatctaaaatctgctagggaatatcaatagatatttaccttttattttaatgtttcctttaattttttactatttttactaatctttctgcagaaacagaaaggttttcttctttttgcttcaaaaacattcttacattttactttttcctggctcatctctttattcttttttttttttttaaagacagagtctcgctctgttgcccaggctggagtgcaatgacacagtcttggctcactgcaacttctgcctcttgggttcaagtgattctcctgcctcagcctcctgagtagctggattacaggcatgtgccacccacccaactaatttttgtgtttttaataaagacagggtttcaccatgttggccaggctggtctcaaactcctgacctcaagtaatccacctgcctcggcctcccaaagtgctgggattacagggatgagccaccgcgcccagcctcatctctttgttctaaagatggaaaaaccacccccaaattttctttttatactattaatgaatcaatcaattcatatctatttattaaatttctaccgcttttaggccaaaaaaatgtaagatcgttctctgcctcacatagcttacaagccagctggagaaatatggtactcattaaaaaaaaaaaaaaagtgatgtacaacc

SEQ ID NO: 185 - DNA, 924 bp, Homo sapiens
cgaccgcggagcagcaccatgtcggcgccggcggccaaagtcagtaaaaaggagctcaactccaaccacgacggggccgacgagacctcagaaaaagaacagcaagaagcgattgaacacattgatgaagtacaaaatgaaatagacagacttaatgaacaagccagtgaggagattttgaaagtagaacagaaatataacaaactccgccaaccattttttcagaagaggtcagaattgatcgccaaaatcccaaatttttgggtaacaacatttgtcaaccatccacaagtgtctgcactgcttggggaggaagatgaagaggcactgcattatttgaccagagttgaagtgacagaatttgaagatattaaatcaggttacagaatagatttttattttgatgaaaatccttactttgaaaataaagttctctccaaagaatttcatctgaatgagagtggtgatccatcttcgaagtccaccgaaatcaaatggaaatctggaaaggatttgacgaaacgttcgagtcaaacgcagaataaagccagcaggaagaggcagcatgaggaaccagagagcttctttacctggtttactgaccattctgatgcaggtgctgatgagttaggagaggtcatcaaagatgatatttggccaaacccattacagtactacttggttcccgatatggatgatgaagaaggagaaggagaagaagatgatgatgatgatgaagaggaggaaggattagaagatattgacgaagaaggggatgaggatgaaggtgaagaagatgaagatgatgatgaaggggaggaaggagaggaggatgaaggagaagatgactaaatagaacactgatggattccaaccttcctttttttaaattttctccagtccctgggagcaagttgcagtctt

SEQ ID NO: 186 - DNA, 1774 bp, Homo sapiens
gaggcaatggccggcaaccagctgtaagcgaggcacggaagacatatgcttgtgagacaaaggtgtctctgaaactatggatggtacaagaacttcacttgacattgaagagtactcggatactgaggtacagaaaaaccaagtactaactctggaagaatggcaagacaagtgggtgaacggcaagactgcttttcatcaggaacaaggacatcagctattaaagaagcatttagatactttccttaaaggcaagagtggactgagggtattttttcctctttgcggaaaagcggttgagatgaaatggtttgcagaccggggacacagtgtagttggtgtggaaatcagtgaacttgggatacaagaattttttacagagcagaatctttcttactcagaagaaccaatcaccgaaattcctggaaccaaagtatttaagagttcttcggggaacatttcattgtactgttgcagtatttttgatcttcccaggacaaatattggcaaatttgacatgatttgggatagaggagcattagttgccattaatccaggtgatcgcaaatgctatgcagatacaatgttttccctcctgggaaagaagtttcagtatctcctgtgtgttctttcttatgatccaactaaacatccaggtccaccattttatgttccacatgctgaaattgaaaggttgtttggtaaaatatgcaatatacgttgtcttgagaaggttgatgcttttgaagaacgacataaaagttggggaattgactgtctttttgaaaagttatatctacttacagaaaagtaaatgagacatagataaaataaaatcacactgacatgtttttgaggaattgaaaattatgctaaagcctgaaaatgtaatggatgaatttttaaaattgtttataaatcatatgatagatctttactaaaaatggctttttagtaaagccatttactttttctaaaaaagttttagaagaaaaagatgtaactaaacttttaaagtagctcctttggagaggagattatgatgtgaaagattatgcctatgtgtcttgcagattgcaagatattttaccaatcagcatgtgttacctgtacaattaaaaaaatatttcaaaatgcaatgcatattaaatataatacacacagaaaaactggcatttattttgttttatttttttgagatggagtttcgttcttgttgcccaacctggagtgcaatggtgcaatctcagctcactgcaacctctgcctcccaggttcaggtgattctcctgcctcagcctcctgagtagctgggattacaggtgtgcgccaccacgcccagctaattttttgtatttttagtagagacagggtttcaccatgttggtcaggctgatctcgagctcctgacctcaggtgatctacccacctcggcctcccaaagtgctgggattacaggcgtgagccactgcacctggcctgacattctttatgaaatttagaattgttgaagaactataacatttcagtagggttcaaggtggtcccaaaagttatataaaagattagtttttactataaacccttgtcttttactcagatcctagcatcccttttcacatggtttctccatgtatataacagaatcaagaaacaaattttaattaaacaatctgtaacagaatcaagaaacaaatacattttaattaaacaatctatatggaacaaacattcccaaattctaagaataaatttttctttaagttttctctga

SEQ ID NO: 187 - DNA, 851 bp, Homo sapiens
gggagctcaaagtgtgccttctcggggacactggggttgggaaatcaagcatcgtgtgtcgatttgtccaggatcactttgaccacaacatcagccctactattggggcatcttttatgaccaaaactgtgccttgtggaaatgaacttcacaagttcctcatctgggacactgctggtcaggaacggtttcattcattggctcccatgtactatcgaggctcagctgcagctgttatcgtgtatgatattaccaagcaggattcattttataccttgaagaaatgggtcaaggagctgaaagaacatggtccagaaaacattgtaatggccatcgctggaaacaagtgcgacctctcagatattagggaggttcccctgaaggatgctaaggaatacgctgaatccataggtgccatcgtggttgagacaagtgcaaaaaatgctattaatatcgaagagctctttcaaggaatcagccgccagatcccacccttggacccccatgaaaatggaaacaatggaacaatcaaagttgagaagccaaccatgcaagccagccgccggtgctgttgacccaagggcgtggtccacggtacttgaagaagccagagcccacatcctgtgcactgctgaaggaccctacgctcggtggcctggcacctcactttgagaagagtgagcacactggctttgcatcctggaaggcctgcagggggcggggcaggaaatgtacctgaaaaggattttagaaaaccctgggaaacccaccacaccaccacaaaatggcctttagtgtatgaaatgcacatggaggggatgtagttgcatttttgctaaaaaaaaaaaaaa

SEQ ID NO: 188 - DNA, 2187 bp, Homo sapiens
gcgccgcgtcccgcaggccgtgatgccgcccgcgcggaggtggcccggaccgcagtgccccaagagagctctaatggtaccaagtgacaggttggctttactgtgactcggggacgccagagctcctgagaagatgtcagcaatacaggccgcctggccatccggtacagaatgtattgccaagtacaacttccacggcactgccgagcaggacctgcccttctgcaaaggagacgtgctcaccattgtggccgtcaccaaggaccccaactggtacaaagccaaaaacaaggtgggccgtgagggcatcatcccagccaactacgtccagaagcgggagggcgtgaaggcgggtaccaaactcagcctcatgccttggttccacggcaagatcacacgggagcaggctgagcggcttctgtacccgccggagacaggcctgttcctggtgcgggagagcaccaactaccccggagactacacgctgtgcgtgagctgcgacggcaaggtggagcactaccgcatcatgtaccatgccagcaagctcagcatcgacgaggaggtgtactttgagaacctcatgcagctggtggagcactacacctcagacgcagatggactctgtacgcgcctcattaaaccaaaggtcatggagggcacagtggcggcccaggatgagttctaccgcagcggctgggccctgaacatgaaggagctgaagctgctgcagaccatcgggaagggggagttcggagacgtgatgctgggcgattaccgagggaacaaagtcgccgtcaagtgcattaagaacgacgccactgcccaggccttcctggctgaagcctcagtcatgacgcaactgcggcatagcaacctggtgcagctcctgggcgtgatcgtggaggagaagggcgggctctacatcgtcactgagtacatggccaaggggagccttgtggactacctgcggtctaggggtcggtcagtgctgggcggagactgtctcctcaagttctcgctagatgtctgcgaggccatggaatacctggagggcaacaatttcgtgcatcgagacctggctgcccgcaatgtgctggtgtctgaggacaacgtggccaaggtcagcgactttggtctcaccaaggaggcgtccagcacccaggacacgggcaagctgccagtcaagtggacagcccctgaggccctgagagagaagaaattctccactaagtctgacgtgtggagtttcggaatccttctctgggaaatctactcctttgggcgagtgccttatccaagaattcccctgaaggacgtcgtccctcgggtggagaagggctacaagatggatgcccccgacggctgcccgcccgcagtctatgaagtcatgaagaactgctggcacctggacgccgccatgcggccctccttcctacagctccgagagcagcttgagcacatcaaaacccacgagctgcacctgtgacggctggcctccgcctgggtcatgggcctgtggggactgaacctggaagatcatggacctggtgcccctgctcactgggcccgagcctgaactgagccccagcgggctggcgggcctttttcctgcgtcccagcctgcacccctccggccccgtctctcttggacccacctgtggggcctggggagcccactgaggggccagggaggaaggaggccacggagcgggaggcagcgccccaccacgtcgggcttccctggcctcccgccactcgccttcttagagttttattcctttccttttttgagattttttttccgtgtgtttattttttattatttttcaagataaggagaaagaaagtacccagcaaatgggcattttacaagaagtacgaatcttatttttcctgtcctgcccgtgagggtgggggggaccgggcccctctctagggacccctcgccccagcctcattccccattctgtgtcccatgtcccgtgtctcctcggtcgccccgtgtttgcgcttgaccatgttgcactgtttgcatgcgcccgaggcagacgtctgtcaggggcttggatttcgtgtgccgctgccacccgcccacccgccttgtgagatggaattgtaataaaccacgccatgaggacaccgccgcccgcctcggcgcttcctccaccgaaaaaaaaaaaaaaaaaa

SEQ ID NO: 189 - DNA, 257 bp, Homo sapiens
  misc_feature (1)...(257): n=a,t,g or c
ttttttttttttttttcataaatacacaattttatttgctatttccaggggaaacttaggcattaaactgtaagctgataaaatacgatacctaaaaaagtataaaagtataaatatccccttagaataaattttagtgaattaagtcttaatatctttaaattaaaaaaaccacaagcctatctactatgtcaaggtcaaaaatcaaacaacgctaagcggccancagctccccagagaggatgcccaggagcccc

SEQ ID NO: 190 - DNA, 567 bp, Homo sapiens
  misc_feature (1)...(567): n=a,t,g or c
tggaataatggcaacagaaagactggctaactacaccggagcatctatgcnaataccaggacaccacatatataaaccatgtcgtttccgtggctgggtggggcatcagtgatgggactgagtactggattgtccggaattcatggggtgaaccatggggcngagagaggctggctgaggatcgtgaccagcacctataaggatgggaagggcgccagatacaaccttgccatcgaggagcactgtacatttggggaccccatcgtttaaggccatgtcactagaagcgcagttttaagaaaaaggcatggtgacccatggaccagaggggatcctatggttatgtgtgccaggctggctggcaggaactggggtggctatcaatattggatggcgaggacagcgtggtactggctgcgagtgttcctgagagttgaaagtgggatgacttatgacacttgcacagcatggctctgctcacaatgatgcagtcagccacctggtgaagaagtgacctgcaacacaggnaaccgatgggacctcagtcttcttcagcagaggactttn

SEQ ID NO: 191 - DNA, 456 bp, Homo sapiens; identical to SEQ ID NO: 7

SEQ ID NO: 192 - DNA, 485 bp, Homo sapiens
  misc_feature (1)...(485): n=a,t,g or c
tttttttttttttatttttgctaaattttattttcaaagtttcaaacctttccaatttttttttattttttaccccaaaaaaggtatcaatacttttcattccactcttgtcaactttagccaaagccttctgagctgcagtcattttgctatttttcttttcagtcttcaaatctttagtattaaacttagtgtaatcttcttttgcttctacaggctcatctgataactttattttctttgatggaggatttggcaatgaggctgaaggttctggaagctttaagtatttagataagtcatcacttaattctttagggatgtagtcagatatcagaccatgggcataacgaaatataatcctcttccttgtcagtggaagcttggtcaccagagaaaaatgcagtgactgtacccggggaactggacattcacattattgggnttttaatgctgccacagtttgattaaccntttttttccaa

SEQ ID NO: 193 - DNA, 297 bp, Homo sapiens; identical to SEQ ID NO: 9
  misc_feature (1)...(297): n=a,t,g or c

SEQ ID NO: 194 - DNA, 1522 bp, Homo sapiens; identical to SEQ ID NO: 12

SEQ ID NO: 195 - DNA, 408 bp, Homo sapiens
  misc_feature (1)...(408): n=a,t,g or c
atcgcttgaggccacgagttcaagatgaggttggcaacatagtaagacctcatcactacaatttttttttttttaaattagtgaagtgtggtactgcacacccgaagtcccagctacttgggaggctgaggcaggaggattgcttaagcccagaaatttgaggctgcagtgagccatgattgcaccactatgctccagagtctaggcaacagagtgagaccttatctctttaaaacaaacaagaatgaagttaggtatctgtttatttgtttgagccatttgtatttccttttttgtaggactgtcctgtttnaaacgttaaaatcactgctgtnggttttngatttttacatctcagctgggatgggcaccaattaaattatttnaggccctggtttattgnaaaat

SEQ ID NO: 196 - DNA, 382 bp, Homo sapiens
  misc_feature (1)...(382): n=a,t,g or c
actcctcttgctcgtcatgtctggccgcgnaaaggcgggaagggtcttggcaaaggcggcgctaacacgcgtnaaagtactgcgcgacaatatccagggcatcaccaaggctnacatnncgcactttgctcgccgctgcgctgganagcgattctccggcctcatctacgaggagactcgcggggtgctgaaggtgttcctggagaacgtgatccgggacgccgtgacctatacagagcacgccaagcgcaagacggtcaccgccatggatgtggtctacgcgctcaagccaggggccgcaccctcttacggttttcggtggttgagcgtccttttcttaccaattaaaaggccctttttcagggcaaccccttaaaaaaaa

SEQ ID NO: 197 - DNA, 839 bp, Homo sapiens
  misc_feature (1)...(839): n=a,t,g or c
gnnnnnngnnnnnnnnnnnttnttgagnaccgcagtngcagcagcagcagccgctgncgcaaacaagccctcccacgtttgaggggagtcatgagccgtttcctgaatgtgttaagaagttggctggttatggtgtccatcatagccatggggaacacgctgcagagcttccgagaccacacttttctctatgaaaagctctacactggcaagccaaaccttgtgaatggcctccaagctcggacctttgggatctggacgctgctctcatcagtgattcgctgcctctgtgccattgacattcacaacaagacgctctatcacatcacactctggaccttcctccttgccctggggcatttcctctctgagttgtttgtcttatggaactgcagctcccacgattggngtcctggcanccctgatggtggnaagtttctccatcctgggtattgtggtcggctccngtattttagaagtagaaccagttccagacagaagaagagaactgaggcagaatatcaaccccagggtggatcaantgggttacaagtggttnaaaannnnnnnnnnnnnnnncnnnntnntntnaannnnnnnnnnnnnnnnnnnnnnnnnnannnnnnnnnnnnnnnnnnnnnnnnnnnnnnnnnnnnnnnnnnnnnnnnnnnnnnnnnnnnnnnnnnnnnnnnnnnnnnnnnnnnnnnnnnnnnnnnnnnnnnnnnnnnnnnnnnnnnnnnnnnnnnnnnnnnnnnnnnnnnnnnnnnnnnnnnnnnnnnnnnnnnnnnnnnnnnnnnnnnnnnnnnnnnnnnnnnnnnnnnnnnnnnnnnnnnnnnnnc

SEQ ID NO: 198 - DNA, 470 bp, Homo sapiens; identical to SEQ ID NO: 18

SEQ ID NO: 199 - DNA, 275 bp, Homo sapiens
cctcttgttctctgcagaggatcagctgggcctgtccctgctcagcctggagcagctagaatcagaggagacgctgaagaggatagagcagattgctcagcagctctgagtggggcgggtggggccataaacggttcctggtgactcctgagtcttgcctggccctggttcccagcggcggtggtgctagaaggtcttatgaagtcaggtgacatttctcactgtcacgtccacagcctttaatcgcaggagaaggcagctatccaccaggtacc

SEQ ID NO: 200 - DNA, 738 bp, Homo sapiens; identical to SEQ ID NO: 19

SEQ ID NO: 201 - DNA, 446 bp, Homo sapiens; identical to SEQ ID NO: 20

SEQ ID NO: 202 - DNA, 469 bp, Homo sapiens
  misc_feature (1)...(469): n=a,t,g or c
actgtgataaaacatacacagtttacaagaatatgaaatgctttactaattcgtgtgtcatccatgctaatcatctctctattgttccaattttagtacaggtgcttttgaagtgggcactcttaattttttgaacattttctaggtttctgataccatactcattctgtgtcttacctatcacaaccccagaatcagccatttctccaaattccttttagtggagagtggtatttagaaaccaggatctggacaccatttctctttttgttattgttgtttgccttgctttaatgatagctctttttattaatttttccattattataaaagatggccaaatacatacatttctatggaaaatgaatcaagtcttatntattttacagttaaaatttcattattcctattttaactgataaaccagtttaattttcaagatgtattaaagtctcccacaattgtattc

SEQ ID NO: 203 - DNA, 442 bp, Homo sapiens; identical to SEQ ID NO: 21
  misc_feature (1)...(442): n=a,t,g or c

SEQ ID NO: 204 - DNA, 428 bp, Homo sapiens
  misc_feature (1)...(428): n=a,t,g or c
tttttttcagtaatacagatgtctattttattaaaaaagttacaaacaggtggactgcagggtcgtcttacaaaatgacaagaatgaaatctattggaaaaattttacttttacaaatctttataggtaattgttcaatgtttgtacttgttatttgagattttacctttcactgataaagttacagtacattagatccatgataataggttacattattttatttgcagagccctactgcagtgatttgaacaactcctaaatagatgccataataaagacaagacatatattgcatttaatattaatttattatcctaataagcaacatgcaatctattgaggaagctaaaataacttttggtcccctttcttaaaatgtgctggagaaaccacccttaaaatcactttcccccggattccngcga

SEQ ID NO: 205 - DNA, 413 bp, Homo sapiens; identical to SEQ ID NO: 22

SEQ ID NO: 206 - DNA, 422 bp, Homo sapiens
tgatgcttgcagagaaccccaataacttgatcttcaagacgggaattacttctgattacactctgagaatatctgtcatctgcctttgacaccttataagttgattcttgagcattaatttctccatcagatagcctttgggttgatgactcaagagatgcttgtggctgcaacacctgtaactcttgcattggaaaaccatcttcttgctttgaagatggatacacatctgagtcaagctttctttcagcataagactttgggtcaggggaaagttatgttattttgtaatgtctgacaatgagtagagggatgcaaaaagattgatgactggacagcaggcaaaaacttctgggactgggggagatgatgactcttgagtctgaacattttgggaagaatgcatagaaatataattctgg

SEQ ID NO: 207 - DNA, 388 bp, Homo sapiens; identical to SEQ ID NO: 23
  misc_feature (1)...(388): n=a,t,g or c

SEQ ID NO: 208 - DNA, 421 bp, Homo sapiens
  misc_feature (1)...(421): n=a,t,g or c
tttttntnttcattgctcaggtaagaatttattaagtcaatttaaactanacattactaccattgcaaaagcatttgctctgaaaagggactgaaaaatgcatcataaagttacatagttcagcaacaatatcaatattgattatataaagtaaaactactggcaaacgtcatttaagcttaccctgtaatttttaataactttataaggagcaaatgtgtcaccttaaaaatgtaccagtggcatttacaaattccttcaaactcatttacaaatacagtaataaaaattcctgagctcccttttcttacaccagtattcaccaatcaacatccatgcggtgttttatttgacccacatcctctttccttttcttaagaaaatattttatcacattcgtaaaagtatctgtgcttcangt

SEQ ID NO: 209 - DNA, 211 bp, Homo sapiens
tttttttttttttttttcaccattatttgttaattttattttgatttttaaaaggcattattcagtgtacaattaacaaagaaatcagttttctactctactgtacttaggatgcttcaaaaacatcaggtgaaatgatctatgctttaagagccagaaaactcaggcctcagcaactaaaacagagaattccaaaattgtaattacaaat

SEQ ID NO: 210 - DNA, 415 bp, Homo sapiens; identical to SEQ ID NO: 24

SEQ ID NO: 211 - DNA, 637 bp, Homo sapiens; identical to SEQ ID NO: 25
  misc_feature (1)...(637): n=a,t,g or c

SEQ ID NO: 212 - DNA, 261 bp, Homo sapiens; identical to SEQ ID NO: 26

SEQ ID NO: 213 - DNA, 445 bp, Homo sapiens; identical to SEQ ID NO: 27

SEQ ID NO: 214 - DNA, 466 bp, Homo sapiens; identical to SEQ ID NO: 30
  misc_feature (1)...(466): n=a,t,g or c

SEQ ID NO: 215 - DNA, 446 bp, Homo sapiens; identical to SEQ ID NO: 33

SEQ ID NO: 216 - DNA, 465 bp, Homo sapiens; identical to SEQ ID NO: 35
  misc_feature (1)...(465): n=a,t,g or c

SEQ ID NO: 217 - DNA, 315 bp, Homo sapiens
ttcgaaacctaaaaatgtattttattttgaagttgtgctttggattttccccaatccaacatctgttgagtgacagtcttaggttcacacaaagcatctccaagcatacatacaatattccagttatcaacactattttaaagaatataccattttacacaaatgtgacatacaagtcagacgccacaacattgcgattccctggaagatgtgacttctcttctgcatgggaagtagatctgcaccagcccttccagtgctctgcgcatcccggtgctggcatcaccgctcctcatctccttggggagaagccag

SEQ ID NO: 218 - DNA, 382 bp, Homo sapiens; identical to SEQ ID NO: 36

SEQ ID NO: 219 - DNA, 323 bp, Homo sapiens; identical to SEQ ID NO: 37

SEQ ID NO: 220 - DNA, 416 bp, Homo sapiens; identical to SEQ ID NO: 38

SEQ ID NO: 221 - DNA, 388 bp, Homo sapiens
ccgaggcttcagttctgtaccatttaatgcgtgcaaaggacattccatggtgtctgctgggttcagggcaactggctttcccaaggcatacaagaaaagttggcagaaagtcctcccctttaaaattcaagcctgaaggttttgtgtgggggcctactgcccctaatgtcttctggtgatactgcagcacagtccatcaaaatagtttgtggttttgccatctgttactccttatgcccacctggagaggggctagcatctttaggtgggaccacccctggcacaacatggtctctgaggtccagatactctgagggtaggggctggctctctctgcctccctatcccctacaagagggacagggagaggtagaacattgggatcttt

SEQ ID NO: 222 - DNA, 353 bp, Homo sapiens
gttatttaaggatttgtttaatgttttaaaattcaaagcactttaaattattttaagacaaaagattaataaaaacaacattacctttcaaatacaactttataacagcacagtggaagaatggtaaacagtccctcttttttttaaaaaaaaatcagtacttaaaaccaaaggaaggcttatatgtacagctaattcagaaagggaacaatgacacctaaagacatagataaatgcttcattttaatccaataaatgtcctacctactggatcttaataatgatgttttcaatatgccatttaaaataaactatccttgaaaataaagttttaaatcattcaatataatcta

SEQ ID NO: 223 - DNA, 366 bp, Homo sapiens; identical to SEQ ID NO: 41

SEQ ID NO: 224 - DNA, 535 bp, Homo sapiens
attgataaacacagtaaatatattttctcttccttatgattttctaagtaacattttcttttctctagcttactttaagaatacagtatacaatatatataatacatcagtcaggctcccagtcaataacaggctactagtacttaagactttggggaatcaaaagttatatgcagatttttgactgtgcggggcgtaggggtgggtcagtgcccctaccacctgcatttttcaagtgtcaactatatatatgtatgtgtacatacacatacacatacacacacacacacacacacacacacacacacacacacacacgagtgtattaattcctcagaagcccagccaggcatcttagcttggctactttttaattagaaacaactattttattcagaaaagtatacacagttagcaattagaatcttcttatatacagacataacttgcagaaggttaagtctgaggacgctgttctgggtaatttttacagtcctttttagctctaagatccatgacactgcatttttatggc

SEQ ID NO: 225 - DNA, 337 bp, Homo sapiens; identical to SEQ ID NO: 43

SEQ ID NO: 226 - DNA, 451 bp, Homo sapiens
acaagatgccacttgcatgatgctgtgggtgccttttcattgcaatgcctccatttcagatgtgagaaagttctgggcctgtagggcatttcaagcctaggtgtgtattgtggaggaggggatagatgttcatctatgcaccagatcctcagatccccgaggtgggttgcggggaaggcccagggagctgatggataaagccacagcttcagtcctggcagagttcactgccaggaatggctgctgactgcggggcactgatggtgggcagccagggccgaggtgcaaacttcttcccacaaggagttccaggtgttcagtggcagccagttcctcagttaatgggtcacctgctgctgcggccactctctgttgatgcagtaagccggttgaggggcgtcaaggggctggacaggacaccccgcaaactttccagccattcctgctgttt

SEQ ID NO: 227 - DNA, 423 bp, Homo sapiens; identical to SEQ ID NO: 44

SEQ ID NO: 228 - DNA, 385 bp, Homo sapiens; identical to SEQ ID NO: 49

SEQ ID NO: 229 - DNA, 207 bp, Homo sapiens; identical to SEQ ID NO: 52
  misc_feature (1)...(207): n=a,t,g or c

SEQ ID NO: 230 - DNA, 351 bp, Homo sapiens
aaaaatggtattcatttttatttcaacatgtcaactgtgcatttccaaaacagcaggcttttcaaaggaataaatcagaactgtaaacacaagatacagtacaagtttttgacttcctacagtcagtttcacaaatccacatactgtacattcataggtgaggttaagcctgtcacccatttctttatttctataattacacaagcataataaatacatctgattttaaaggtcacttaaaatgagtcataatttacagtacagtacgtttcagttcaagtgcaaaaaataactatttgctgaattctatttctttcagttattttatttttaagctgtgttttattgtga

SEQ ID NO: 231 - DNA, 318 bp, Homo sapiens
  misc_feature (1)...(318): n=a,t,g or c
ctgggtgcaaggaacattttattccataactgtctccaccgaagccgcagaagcaaagccaggagcagaatccattctgccagcgctgggctctggggagacatctgtgccctcaccatggaggacagaaggcaggggcctcccgactcnttggtcctgcctggggtgctcctgtccctctttnttgctgggggacctaccccaccntccccctcccacctcagtcacagaggaacaagggagacaaactgagggctctgcagtccccgttcaaggncaacataatagtcgtgtggccccagcccagctaggcgcatc

SEQ ID NO: 232 - DNA, 228 bp, Homo sapiens; identical to SEQ ID NO: 54
  misc_feature (1)...(228): n=a,t,g or c

SEQ ID NO: 233 - DNA, 479 bp, Homo sapiens
tttttctctttgaaagtttattgttttctttaaaaaaaaaaaaaaacctataccttttatattttacattcacctctcagaatatttaatggtacccgttaacgatgttataaaaaaagaccaccacctgcttgaaatggctgcaaatttaccatgttctggcattaaagtgatttcaactctttggacaaattggtgtaacagtaagcaccgagatttcaaattcccagatgagaaaaaaaaaattaatcaggaggaaatttatttagtaaaaattcaaagctaaagaaatgtgagaaggaagccaaacccaaaaaactgtaaaaaatacaatcttctctccagaattaggttaaaaaatacagtcaaccccattctaaaccccatatttcttagaaaagtcacccagtcctgaacacagggtcttatacacaaatacatgtagcttgatttgcagatcagcctctgggatcgacctt

SEQ ID NO: 234 - DNA, 388 bp, Homo sapiens
tttttttttttttttttttgcatttcaaatattttaatagttttatttcgcaaagagaagcctaagaatttttttaaaaacatttccagagagaacactttataccataaaataaacttgtataatttgggaggacaaatcatctcaaatgtatatttttgaattatgtgccaattttataattagtacaaaaatgacagctgaaatattttaaaaatgtaaaaaccagtccaggcaacataactataccatcttgctgtaaaagtacttatatcgaattccgcacaaaatatttttgcaatatgctaaatttagttcttcaagtcactcttcactgccggctggcttttccattttctgttgtctccatcccattttcctctttaag

SEQ ID NO: 235 - DNA, 536 bp, Homo sapiens; identical to SEQ ID NO: 55

SEQ ID NO: 236 - DNA, 378 bp, Homo sapiens; identical to SEQ ID NO: 57

SEQ ID NO: 237 - DNA, 455 bp, Homo sapiens
tttttactgtatcttatttgatgatatttattttctctgccaagctgtatagtaaaaggaaaataagtcacatctggtcattggcatttgtatcgtcattctgtaaagacaaaagagtacctatataagaagctccacgtagtgcaaatcgacatctggtaggctgctcgcccccaggcagcagctagagtctgtaattctctgcgtcatcctcttctttttcttcatttttgctttttcttcgcttgagttcttctctgaaattatatgcaaagagttgtgggtcttcatcacacatttttctgtatacatcacagaggctcttaaagtgtgagatggagagctggcggggccgaagagtagggtctatgtctgccaactctaacagcctgcccgtgctttccaagcgctgcgcttcagggaataacattctgagccctcgatggcagtatttc

SEQ ID NO: 238 - DNA, 357 bp, Homo sapiens; identical to SEQ ID NO: 59

SEQ ID NO: 239 - DNA, 378 bp, Homo sapiens; identical to SEQ ID NO: 60

SEQ ID NO: 240 - DNA, 330 bp, Homo sapiens
tttttttcaaggattcacaaactatggcattttatttcagagcctttgcttacatttgtacaatatattacataattcttcattgtttgcagatcctaatatatactttatagcttttattctataagcttttttcttcaacattttgctgtcaacaaatctttacagtcctgtacaaatttgaataacttgaaaccattttcaacaaaattagttactgtaagcacacactacaagactgaaaatgcttttcttagaaaagttgaatgtaaaggattctgacacgttagcatctacaacaaaacgcattgaaattcccacgtcgtattg

SEQ ID NO: 241 - DNA, 459 bp, Homo sapiens
tttacacaagaaagtgctgcttacattgttgttttgtgttatttagtgatttgttcagcgctcatctcttccaccagactgcgcttcctgaggacagggaccttaaagcacctcacatagggtgcgcgtctggtacactgtcgccgagtaccagacaaccagtgtctcacacgggggaagacgatgaagacagcaatggcatccttgggaagatgggcaggagaccccatgacacctggcacctgggcctaagctgggaggccagcggcgtccccaggagaccacggcccaggctgggagcttgaccggccagacgcccgtgggtgggcctgggcctcccgcctgggagcctccagtgtggcgcctggctctgggtgggtaacaggagctacaggccagcaatgcccttcctgtcctcggcctggctcaaggactgggtgcagagggcatcagcgatgc

SEQ ID NO: 242 - DNA, 418 bp, Homo sapiens; identical to SEQ ID NO: 62

SEQ ID NO: 243 - DNA, 396 bp, Homo sapiens
ttttttttttttttttttggatcaccagcaattctctttaatcctctttcttttccttctaaaagcttttgcaaagtccaatttatttttacagtaaatagattatcttttaagaaaacgcactagcaagattgtagcaaagtgtgtttatgcaaacaggtggtgcagagacagaggggcggaccttgtgggcagctggaggaccatcccagctcatgggccacgcacagatgggagcacctcagtgttttcagccaagagaacacaagtctcgggatccatgtggctccctcaggccctggacccaggcaggcaggacacccttgaccatggggcaggggacatcccagcatcttgtctgtacccccaccacctgcgtggcacctggtcctcaga

SEQ ID NO: 244 - DNA, 286 bp, Homo sapiens; identical to SEQ ID NO: 63

SEQ ID NO: 245 - DNA, 307 bp, Homo sapiens
ctccctaggaaggatatcccaaagcaagggcatcttgaaaagcatgattttctcggtaatgtttgccaacactgttcactttccacatggtcacgactgaaaacacatttaccaatacctttcaagcgatatgactaccagaaatagatcttctttactaccctctctgaaatgagtaaacaagaaataaattcagaaggtaggcttttgaaagaaaaagaaaaaaaattgcttgcggcttcacagtgaaaaaaattggagtgtttgtgccggttaagattttaatggtttcttaatcaaaattctc

SEQ ID NO: 246 - DNA, 429 bp, Homo sapiens
ttttttttttttttttctacacacagtgactttattactctatggatgctggtgaactgccctccccaaccagcttcacgggggcaggcatctctgtccatcccatgcctttgggtcacagggggcagcaagaccaagaagaccacagccaggccctgggttcagcttcagagccatcacccgctgcctcccccaacccccaatctcctgagggaggagaattcctagggacaagacccagacccctttccttcagcctctgcttcaccaagggggcctggcctgcgcccgagctcctcctggcctgcccctcagggatcccaggtcctcacctctgctcttcaggcaggaaaagggcagggagagaggaatggaggagggagagggaggctgggcgcaggagagagaagaggggggaaggaggagaca

SEQ ID NO: 247 - DNA, 375 bp, Homo sapiens
tctcaggacccaatagattttatttcaggtggggataagggacaagcaatgtgaagacagggaaggaaagaaggaagtctctatgttctgaaggactgcctaccccactgttgagagtgccacattctgcccttttagcaattttaattaatttttactaggactttggtaacaccacagaaaccctgtggcttcctgttaaaatgactgtgttacatgccttatttttattaaagtggaatttaacaaatacttttattattttgaagcatttcatcaattctcggtggaagcactacatcatcgaatgggaaataacaaatgaaaaatgaaaaaaaagattatccattcacagtaagcaccattttactagaa

SEQ ID NO: 248 - DNA, 304 bp, Homo sapiens
tttttcttctgtataaaagtatattttatttaaaaacagtgatattgacatgtatgttatagcccttacagaaaaataacacgttttatagtccttttatttgaaattcagtgtaaatcactcttaaactataaattcacagttgttggaggtttttttttactttaaatgatgtgaaagcatttgttccattcaaaggcccctatgcctttgaatgacatattctcagtaacttcttggccagtaactagagtatgtgagactgagtaactagaatgtgcatatttcatgaattagcttcccg

SEQ ID NO: 249 - DNA, 387 bp, Homo sapiens
tttgaagggagcagagggcaggcacgcgagccacggccacgctttattgcttaagacgcacacagaacacagaggaacaaacaaggaggaaagggcgccacacacagcccagaccaggcaggagcggcccagccgcggaagagacgttccttgcaaggcagggccctgctggatagcacgccccctgggacgagggtcagggaccccaggactgcacagctgcagacttgctgggaacctggtacaggtgatacgcccactctcgcctgttgtcagagcttctacctctgcatccagccatgcacccaccatttccccacagggtacaggggcagccttccttgatccacagccaacccttctcctgctgtctctggctgtcagtga

SEQ ID NO: 250 - DNA, 324 bp, Homo sapiens
ttgtcaatgttagaaacatttacttctgacgataatccatatagctttctctgatgttacacagcgattacatctccttgtgtctaaattaaagtcaaagtatgaattttaagatgatttttaattatttaacaagtagaaatacgatcagtgacaattatcaattaaaacattaaacaacccagttaccttttcttaacagtcatgatgaaatatccctttcctgtcttatcagaagccttaattattctctaccacacacaccacaaaagcttcttaatagagcatcagtgtccatcacacctttgtgtagaatctctggca

SEQ ID NO: 251 - DNA, 434 bp, Homo sapiens; identical to SEQ ID NO: 65

SEQ ID NO: 252 - DNA, 337 bp, Homo sapiens; identical to SEQ ID NO: 66

SEQ ID NO: 253 - DNA, 443 bp, Homo sapiens
tttaggtaaaagatttttattcttatttaaccatgctgcatgtatacatacaataccaatatatacaacttgaacaaatacaatttatacataaaatacaatgaaagcatggcttttgaaactgatgcaacaaactgtaatttgtaattttggccagcatacagtattatagtaatgctactgaagttattcattaaattagtcagactacagtataagttcaaaggcactagaaacatctatgttttcttctagtatttttaagaacaaaaaataatttaaaataaaacaaatgtatacattaggaaattgggcagacattggtgtacttaaatgtaaacgctacccattccttaattcacagccctgtaggaaagaagactttccttaagagttaaggggaaggatattaaaaacagactaaaaggaaacaaacaaaacag

SEQ ID NO: 254 - DNA, 463 bp, Homo sapiens; identical to SEQ ID NO: 69

SEQ ID NO: 255 - DNA, 404 bp, Homo sapiens; identical to SEQ ID NO: 71

SEQ ID NO: 256 - DNA, 416 bp, Homo sapiens
tttttttttttgttagaatgaaaaattttatcatcactcctgttcaccccgcagagtctgcggagtgctaaagggcacaccaataaggatccgagggagggggtctacatctgctttttcagcccccaaagccatatattggggtggcccaatataaagctactcattagtttggttcctgagcagacctgctaataaacctcaaaaacacaaaagtctacttcactagccagaaatgaaagcaggatctagatctgagtgggaagggcagagggcagcatgggttgactctagttggaattgtgccagtcttctctggaggccgactcactcgtggagtggggaaaggggtggccaggccccagtctagaaaccccaggcctatgggaagtgatgccaggggaagggaagcagat

SEQ ID NO: 257 - DNA, 193 bp, Homo sapiens; identical to SEQ ID NO: 74

SEQ ID NO: 258 - DNA, 338 bp, Homo sapiens
gaaaaatcaaaaattttaatcttatcatctttacatacaacaaacatgtcaagaccccctattgtctttgaaaaggtcccccctcccccgccaaaatctgtagaccataagtcttggcctacactgacctggtttgtaaaatatcttcctctgtgtacttttcccttcagcctcaggctcttggctgattcgctcacaacagaagcagcttggctttcctctggaagtaccaatttgaaagcccaccagcccgcaaacctagagtgtattctccacccctgggtcacagaacttcgttctccccggctctgtaacccaaggaccctacagcctctgag

SEQ ID NO: 259 - DNA, 224 bp, Homo sapiens; identical to SEQ ID NO: 76

SEQ ID NO: 260 - DNA, 545 bp, Homo sapiens
tttttttttttttttttttttttttttttttttttttttttttaataaatatgagcatttatttggcacccgatggcaatacaaaatcctggcagtgggagtggaaaggttctctctctcaaatacttccatactatgtcgacccaaaggcaggacttggcagcaaggctcacaaaccacccaaacaaatatttattgagcaccttgactactacaggcctagcattttgctagggaccatgggagatgtgaaggaagttatctcacacatgatatgtcttcaaggagctaaaaatgccagtggataaaagcaaaacacatggaaaaacaaagtacaaataataatccgtgtatattgtcaaaaggaacattttatcaaaaggtaggattgtagctaaggttggcttgccttcttccctcttttattcaacaaacatttaatgaaggcccactatgtgccaagcacttggtacatgatggtgaataaaacaaacaaggtttctgccctcatttacagcctggtaggggagacagaaatgaacaag

SEQ ID NO: 261 - DNA, 407 bp, Homo sapiens
caatctgtttgggactttgagggctggggtgggaaggtagtggaatggaatagataaacagccagtcaagagctgtggggaggttgacagaattggggtgcaggtacatgtaggatacacagaagctttgtgtctgtggaggctgtatgagtctgtgggtgagcagcatgtctaagtgggtggaaacatgtatagctaaaggcaggaactcttcccatacagctaaacccttgttcaagcaatttaaataaacaagaacattttaaaaaattaaaaccccactaaaacaatccttgtggagcagttttcttgagtgcttaagtagagaccagattcaaaaaaggattaagagaatgtcgcataaccaagctgcagaaactgaaaccgagcggggtgtgaggggagat

SEQ ID NO: 262 - DNA, 408 bp, Homo sapiens; identical to SEQ ID NO: 78

SEQ ID NO: 263 - DNA, 308 bp, Homo sapiens; identical to SEQ ID NO: 79

SEQ ID NO: 264 - DNA, 702 bp, Homo sapiens
  misc_feature (1)...(702): n=a,t,g or c
ttttttttttaaaaagttgagtatttttattgggtcttcaaatctgggtcccacagtcctcatttgatgtcactcttagctctgtactgatctctcctctgacttttacggagggcttgcanaagtagcctattgcagccaaagtttcactccaaagctacctctctaaggtctaaggttactatggtaaagttttatacaacagttttccttaaaaatattccacgatttgttactcccaaacaaaataagattatgcaccactcggagaaattagtcattctgaagatgtctaagaactatatcactgccaaagaacatttctcagttcatattctttccttcaattttcatttgcacatccacactgtggggttcacaagtcatctgttttccatgatcttatggtcaagtcaagaggacttagacttatacatcattttccaacagctgggatgcgattcacagtttggtgcatacccatatgtatgaaaataagaacctcactcggtttaatcgataattcacatcgagtctcagattggcttgggcagtcttcagtactcctcacatgagatactgntacaggtgtcaggttcaggtcatcggattgagtaccagggctatcggaccagagcgtcagtgaagtaaccacatcttgctcacttcgacttgcagtaaccatagcgacgggactgtgtt

SEQ ID NO: 265 - DNA, 411 bp, Homo sapiens
ttttttttttttttttttttttttttttttttttttttcttattcatcattcattcatttatttgattagttgaaaacacttccgactaaggaagcagagagcccacaatcctgtgggaaaacaggcctgggaactaatatctcaggggtagtgagggtcgggcccagatcctcaaaggttccctgcccctgaaattgcacctttgacagctgctgaattccaagcacagcgttaagtgctttacatggggtaaccctaaaaaacacactgggcctcagacactcccgtacacacacccaacctctaccctgtggatgtcctagataagggttttctcttcacaaaggtaaatcaactctttgcctccttagggagggaaggaataaaggcattatttttgagacttttct

SEQ ID NO: 266 - DNA, 441 bp, Homo sapiens
ggttcaacagatacacactgattatctaacttatcatcaattggaaggtctagttcctcattaaacatgcttttcttatctcccatgtcaagttctggatctgtatatgcaatgatatcaaactctcctgaccttaagaggtcatccaggttgggatcattagtttccaaattatctaaagtatccaattcaactaccttgccatcctctgtatctaaatttaagttttcaagatcttcatcatctaagtctttgacttcaaccccctcaaggtctttaacatccagttccttcacagaagggtcatcagaatcaagtttttcctctagaccatcagaaggctgggtggttatctgtaaattatcagacgttgtttcagacggtacagatgttgacaaaggagcttctgaaaattcaccacctagtggatggttcagagtc

SEQ ID NO: 267 - DNA, 474 bp, Homo sapiens
ttttttttttgatctgcaaaattttattaagcaatagctggacaactgttacaacttcaaatcatcaagaaaaaaataaggagattaatccgtctcagtaataaagacagaaaataacttggacaaaccacatcgttttgaatgcaaaccattaatgccttctagaatatctcctgcacaatctaatacacaaaatacgtaagaagaaaggcaaataaggatgagctcattaaaacgcatttgggagtcgcaacagatcttgcttggaaagtaaaaccagcaggatgctgaattaaaaaacaaacaaaccaacactggaggaactgaggtgcacaagcagtgcacgccactgccgaggtctggacatgaacatgctggtggtctagtttggtctggggcctatgcacctgcatcgtgcacttacggttaaaaaaaaaaaaaagggaaaaagaaaatgccagtagtaataaactc

SEQ ID NO: 268 - DNA, 365 bp, Homo sapiens; identical to SEQ ID NO: 80

SEQ ID NO: 269 - DNA, 273 bp, Homo sapiens
tagctttgcacaaatattttaaagacaaattcagctagtctaagaacttcatgaaaataaaacaggtggataaatacttcatgtgcacaatgcactccatcagacgtcgtcggctgggagaggaggtatgttgatccttggccttgtgaagaatgctatcttctccctaaaggtctgcacttggatgggctctttgtggctctgccacgcagctggtagatctccttggaggccttcttcagcatcttctcagccgcctgctcatgacggtag

SEQ ID NO: 270 - DNA, 383 bp, Homo sapiens; identical to SEQ ID NO: 81

SEQ ID NO: 271 - DNA, 436 bp, Homo sapiens
tgcagactttctttacccgtgcagaccatatggaaaactggccattagtgatgtatttttctccccgggctcctgagccactggcgtccaagttgctccatctgattcttaaattaattttcatcagttgtaaaactctcaagtgtgcacaagaatgagcctgtcttcccgtgtgaatgtgtaagtacagaaagaaggttttaaatgcacatagacacacactcttcaactgccatacgaagcgtctgcttccccagtcatttcaggaaccatcagattattcacggctgggaggccctggagtcttacaaatctgagcatggtggtgggcacctgtaatcccaacttactccaggaggctgaggcagaagaattgcttgaaaccgaaaggcagaggttgcggtgagccaagatcgcaccactgcactccagccta

SEQ ID NO: 272 - DNA, 355 bp, Homo sapiens; identical to SEQ ID NO: 84
  misc_feature (1)...(355): n=a,t,g or c

SEQ ID NO: 273 - DNA, 256 bp, Homo sapiens
  misc_feature (1)...(256): n=a,t,g or c
tctgatanctatgtgaaaattcttttcaaagtaggtaaaagccatcactatatttcaaagaggtcacagtgacatcatatacaaaaggaaccagattgaaaaagatattgctgacatagccagtagtgagattactaaagantaaacagaaatgccttgggaaattatttttacaccggcttgaattgaaacattaaagcaaaatgaaagctgtaaggngttcactagttttcccaaatgcgttgtcaagtttatt

SEQ ID NO: 274 - DNA, 433 bp, Homo sapiens
  misc_feature (1)...(433): n=a,t,g or c
ttttttaaaaacttttattttagattcaggattacatgagcagatttgttgtgaattctatttcaattaacatttagattaggtatcatttgaaaactgttagtattttaccaacattctgcatttctttcttaagatacaaagtctgtaggagtctaattcctgatagaaaaaaaaaatgtgggaaggatactaccacctcccatcaattcatgttcttctacttatactgttcaaatatgggaatgtccctattctcctctgtccctttcaaaccaattcaacctaaaccaaatgtttaaggtgcccttaaaagggcaaggaccattatacctatttcaggctggggggnccaattnaaaattggggaaagggatccttagggnttttttcccctatggcctttcccnggaacccggaggggggggattat

SEQ ID NO: 275 - DNA, 345 bp, Homo sapiens
ttttttttcctaaggctctacttcaaagtgctggctattcaaccaactaatctgaataggtatttggatggtgaggtaaaagctattttaaggtctgttctcatctcactttaataaggtgaaaaaaattgccatatgtactaaaaatagttcactgttctgaaactcaatgcctgtttgccaaaacaatattaatgatgcatattctatgcattttttccccaaatatgggcatctgccgtgcacaaaattcaggaatgggaaaccacgagatatttgaaataacaccatcctctttacatgggttaaaaaagtcaaatggaatccagttacttttaattaaaa

SEQ ID NO: 276 - DNA, 331 bp, Homo sapiens; identical to SEQ ID NO: 86

SEQ ID NO: 277 - DNA, 274 bp, Homo sapiens
  misc_feature (1)...(274): n=a,t,g or c
nanaactgatagcctagcaatacccaaattagaatttgttggctatcaataaataatattttataagcaacagaaacatttaaaaacttggaagaattgtgataggctagctaaaatacaacctacaaaataatttttgtaaggccaggnacagtggctcatgcctacaataccagcactttggnaaggccgaggcaggttgtattgcttgagcccagggagttcaagacctgcctggggcaacaaagtgaggaccccgtctctccaaaaaaaa

SEQ ID NO: 278 - DNA, 417 bp, Homo sapiens; identical to SEQ ID NO: 87
  misc_feature (1)...(417): n=a,t,g or c

SEQ ID NO: 279 - DNA, 227 bp, Homo sapiens
  misc_feature (1)...(227): n=a,t,g or c
taaaaatttttttccactacttttaattgtcagccttttttttttttttaaacaattctctgtgccatgtatttaatcttcacatcatttccaatactggagatataaattgcatagagactgttagagagttctaatttgttttatgcatgttttgcaaatttgactccatgaaagggcattngaatgctgacttngtgtgcaagcattgnccatgnacataaaaa

SEQ ID NO: 280 - DNA, 454 bp, Homo sapiens
  misc_feature (1)...(454): n=a,t,g or c
agaactttggagtaaaaatngtctctgtttccaagacgtgtgagatgtctgaactctgagatggtgtttcatctccacccgatttcaccaaaggggtgtcaatatctttaaagaactgatcttcagtaggaattggtgaggtggcaaggtaagcaggaagcttttcatattcttcttcagtctcctcaacaaagaaagcttctccgttatcacccaacttcatgtgaagatccactgcactgccgttgatttctatatcaatcactttctctttgggatctcagggactcccagctttcccaaacccgaacgtggaaaagggtgaacactggatagcctgcccatcctgctgctgtacccacggatggacatcaaatgcacccagagaggggtggcctggggttaatgcccttgtaggagttccttcacagtgacaatcaccttgcccagccan

SEQ ID NO: 281 - DNA, 112 bp, Homo sapiens
ttaagaaataagaaatacatatatattgaaaaagtgataaatgtaggtatcctgagattctcaactataaaaagaacagtaatagcaatttgaataatacacataaaatcct

SEQ ID NO: 282 - DNA, 444 bp, Homo sapiens
  misc_feature (1)...(444): n=a,t,g or c
tgaacaataatatctttaatataactgtttttgtgtgcatagaaatcatataagtaaataaaaaaaaacaacaacatgagattacataggtggttataatacaaaagtgagaaaaaagctagtgtctgagtattgcatcctggatataattccctgatatatggtaaagcataaaagagacctatttcttcaggagagtagctgacccacctcagggccatgactgctcttctctttccccacagccttagtactttttgccaaaaggcccagatttgagtaaaggggaacgccgtgagcgtaaggatccgggcataagggctgcagtctgttgagctttggcaggttggtgttcggggaagtaaatttcngaaggaatgggttcctnccctgntgggttgttggtttggttgctgattttccnggttgggtaccaaggcgcta

SEQ ID NO: 283 - DNA, 193 bp, Homo sapiens
tgttctacttttaaagatatttaatgatgtttttcaaatcagtacaaaaatttaaatacaaaaatgatttgctattgacaagtctcaaatctgtcatgggaactcaaacaagttaccagtctgttcaccgttcattgtattctataaaatatttgataacagtcacccactacagacattcttttcccctgtg

SEQ ID NO: 284 - DNA, 217 bp, Homo sapiens
taattttcatagatcaatttatttagaattacaaatattaagaatagaagatttatgcatttcttaattaacataacagtttagctaaatataaactctgcactaaagttctgcagtggcacaataccaacaaagaatacggaagcctttttaaactatacaaaaatttcaaatggaaaataatcttgtttcagttttattatacattaacatataa

SEQ ID NO: 285 - DNA, 176 bp, Homo sapiens
gtgatttgccaatgcataacagggtttcaagtttcattaatgaagggactcaatcgcctagaacactaatttcccttccaaagaagagaacaacgaagtttgtgaaaggtgactcttcccctcttggaccgtggaattcacatttcatattcttgatatcaaacaccagtgaaagc

SEQ ID NO: 286 - DNA, 474 bp, Homo sapiens
gcttaacctttttttcttttctgcgttttttatggtggccagagtgtcttgctgtactaaggtctgaataatatccattataggaccatgatctggatctctgagacaagcttctttcatcccatcggcttgaacaggggtcacttaacttatctcctttactccatttttctccactaggtggtctatatgctcttaatctctgcatttcctctttccagtgaggaggagtttcactgctgtcatcatcatctgactcagaacaggatcttgatcttggaggtgtgtgatagcgaattgtgccccttcctttaatcttccgtccagactttgatacagatggtttctgatcacttacaatgggtgcaacatcaggaatcttcggttcaggttctgcagtaacaacaggcatatctcttctcagtaaaaatcggttctcaggcactggaggaatctcttctgggcgggacacag

SEQ ID NO: 287 - DNA, 481 bp, Homo sapiens
gtcatgcaaattgattttatttgtgaaaagattaagaagccacagtaaatgaaaggaaacggttatttaaactgctcccttgatagtcataattatccagttgaggtgtttctttgagagaagaatatagacaccaggcccacgagggtctccgcatttattttcaaggccaaaggaagtgacccctcggaaaacaccctcgcacaacaaagggcttccagaatctccattgcacgagtctcttccacctcggaggcttccagcacaaaccatattcattccaatcacagggttaaaattatagtgatttcgatcattgcagacttttctgtctatgatggtgatattgacttctctcagagtatcggaccaagatgcactattgtgagtcctgccccaccctgcaacttggcacatggttcctggtttcacatcatcccctttttaggtagatgaaggatagtcacatatttgttaattt

SEQ ID NO: 288 - DNA, 412 bp, Homo sapiens; identical to SEQ ID NO: 88

SEQ ID NO: 289 - DNA, 502 bp, Homo sapiens
tttttctttttaagcccaggctttattccagcctctttttgaggaatttgactgaaaagttccctccctctcggctgatgcgccgtcccatcctgggctcctagtgtagggctcctacccttggctccagcaatgctgatgatgaggtgctggggtccccgaggacaggaggcctccaggaaggaaccggcctcagtccacgccgtccagggactgtggctctgcctctcgagctgtagcacctgattttctatgcaccgaaactgccaaggccagcttgtgttgtacagaaatggtcgcagatcaaacctgttgtcctcagggctgtagttctcggcgtggtaccgggtgtgagcgtggtcatcttgtgtctgttcatggagtacttggagaaaaaccgcttcactttgtcagcgacctgtcttggggtgcagatgtgtctccacatgccgaggagtttgcagaacatgctgtaagggcccatcttggccaccttcctgag

SEQ ID NO: 290 - DNA, 289 bp, Homo sapiens; identical to SEQ ID NO: 89

SEQ ID NO: 291 - DNA, 398 bp, Homo sapiens; identical to SEQ ID NO: 90

SEQ ID NO: 292 - DNA, 421 bp, Homo sapiens; identical to SEQ ID NO: 92

SEQ ID NO: 293 - DNA, 418 bp, Homo sapiens
ttttttttttttttttttttttttttttttttgacaatgagaaaaaattttatttatgacgatcttgagcagtataaaactcagaagctccactgaggtgaaggaaacatggacatgatactaagcaaagcctagtcttttccataaaatgaataagaagtacatttggtggagtttgagaccagcctgggcaacacagtgagaccctgtctctaaaagcattaaagcattaatcctcgcatttcgatagggctatgtagcttttaagtaagcaatgttagaatgagttgtagagttttatttttgtgaatatagtgagtgacagatggcaattacatgaggatatttgaacgaaggtacataagcctaaacaatttcacctaggtaaaatattgatgtcataaccaaactatatggc

SEQ ID NO: 294 - DNA, 273 bp, Homo sapiens
tttttttttgcaaaattaaaatccagatcatatttggaagatagacagggaatgcttcctaaaactgccttgaaagtaaaagaaaaaagacttgtcaccatctttggactgctcctttaaaaaaaatttcattaattaaaaaaatattgagtgcttactatgtgctaggcattgagctaggagaaggctatgtggctactaacaggatacacatgatccatattctgatggtataaaaagtaaaacaggaaaaagaaacagactgaaaaatat

SEQ ID NO: 295 - DNA, 182 bp, Homo sapiens
  misc_feature (1)...(182): n=a,t,g or c
gatcaaaattgaagacacattcagaggtttgattggttgagattaactggtgtggtggttggtgtatgtatgtttnattttnatgtctttgtatgtagttctacataatgcaaattgtgctttctgatggacaagacctcataactgtgattaatatcaataaaaaggggatgttgtggaaa

SEQ ID NO: 296 - DNA, 211 bp, Homo sapiens
  misc_feature (1)...(211): n=a,t,g or c
gatgtaacatttgtnattttattggaaaaagctggtattaacatatttatagttttattcaacaattgggtaatttgtgagacaccaaagaaaaaaagaatgcacctatgagttacagagtccaaactgatcagggctgacaacttgaccaccatgtntcccacaccaccacccccaccaccaccaccaccaacagcttcgtcctcagaga

SEQ ID NO: 297 - DNA, 407 bp, Homo sapiens; identical to SEQ ID NO: 94
  misc_feature (1)...(407): n=a,t,g or c

SEQ ID NO: 298 - DNA, 445 bp, Homo sapiens
ggactctctcaactgttgtttgctcaattgtcggtacagataggtaggattccagtctggagaaacccctaaaccactacaccctgcctcagagtagggaagaattttcagtatgtatgtggagacaggctggattagggagccttttgagtggcttctctaggatacctttcttgctaacatgagcaaggttcccctccaggcctgataaagcctgaagaggttagttatttccctactagttctggaagcatcttaattcatgccaccataggaggctgtcttcccctgctcctcccttgaatcaccacctagattttaagttgcttttctggagtttgatgatggaaaccagttcctgtttcaggtgccagaaactttttttttttttgagattgagtctcgctctttcatgctggagtgcagtggtgcgatctcagctcac

SEQ ID NO: 299 - DNA, 544 bp, Homo sapiens
  misc_feature (1)...(544): n=a,t,g or c
ttaatttaaagaaaacttctttattaagtaaatggacagttggtacacagatattgcaaaaatttcgaggcgggtacatgaatgactgaaattcaggagacgcggggagttagcacagaagcactttcctcattcagagctcttttggctgcgagaaacagacacccaatcaaatcagcttcancaaaatgagagaatgtatcctgacaagggacgctcacagggcctaaaggaagagtgctgggcccctggaggactgagggaagccggcagtccctggaggcggtgccggctgctctccaggcgcctgtgattcctctggtccctgccttgctatgcgtatcttccctctgagcagagccattttctctaccacattcatgcaggtgcccatcccccggaacacacacagacaaacacacacacatggacacagtcanagctccagggtttctatgtgttcaggtaaggganctgcaaagcctgaacagcctccctaaatctagatgcccanctttatcctttcagctccatcagangatca

SEQ ID NO: 300 - DNA, 448 bp, Homo sapiens
caaatccagaattactttatataaaagtacacattctaatatatgaaaagatattttatcattattactttactatatattactgaatacaccagactgcattttctcaaatggcaaatgaggcacatttctctttgattcccccaggaacctccgcatcatctgtcttttggaggattcagattcttacgacatctgtgataccgtccatgaggataccaacggtgcttagtagtaaagaacattttgctaagttgttctatcataggtccttcctcaaggtgttcaactttttcttccaatctggttttcagcacttgatcatgtgtttcttcattattatgcacaggatctggccgagggataggttttgtgtgttcatatggaatgtccacagaagggtggtagcatactattgtcctgccatcagaagtcagagcaagctcta

SEQ ID NO: 301 - DNA, 447 bp, Homo sapiens; identical to SEQ ID NO: 95
  misc_feature (1)...(447): n=a,t,g or c

SEQ ID NO: 302 - DNA, 282 bp, Homo sapiens
  misc_feature (1)...(282): n=a,t,g or c
ttcggtgtttgtgtctttatttggagaccaggagacagattacagcttaatgagaggaacaacgactaagtgatctgatgggaagggtgagtttcctggcccttaggaagcaacagatgtgatttctaatcaacaaaaactagtaagtctggaacttttcagacaggaagctgagaggctaccaaaactaaaagtgaaagtgtctgccatcaatgtgtaagtctaaattacnaataaatacattaataaagccccnaacagggggtacaaaaatttgtaatg

SEQ ID NO: 303 - DNA, 210 bp, Homo sapiens; identical to SEQ ID NO: 96

SEQ ID NO: 304 - DNA, 399 bp, Homo sapiens
tttcgaaacatttctctaaaactttatttcaaagttattcacctcaccgttaataaggtgtatgattaatgctctgtgccagtatttgcaggcctgcccattgccggcaatggactttgagaaaacccatttcctggcacccaaaagttaaattactcttttcaaaacataccgatctccccaacacttgcaaaagtattacatgcaccattttgccaccattctttaaatcagaacttacattattaatctacatcagtgaatgttaaatgaagtcattttaacaaattatgactgtacaaatcaaaatactactagttaatattagacaagagtatcttacaaacactactattacatattaccttgcaatctggaaacattatatttcatatttgg

SEQ ID NO: 305 - DNA, 458 bp, Homo sapiens
  misc_feature (1)...(458): n=a,t,g or c
tcccaacaaaacgcaagggtgttctgctctttactaaataaacgttcccttcccagaaaccagccccaaactcatcactgttcaaatatgtggcaaggtgaggctctctgtccccctttaccaggagcacggatggtgtctgcaaggcagtgcctctcgagtcgtcagggagatggcccctcaggctcccaaacctgccaaatacaggactgtgagcggctcgggaggggtctcctttgctctccatccagcgggtcagcgggtccttgcgggggagaaagagccaaacagccgcctttcccttctggtcacagcacgagccaggttccaggcagaggctgtggcaaacattgtcatcgccccatggtgaaactgggcacttcctcctcctcctctgttccagatgnctccgnagaactgctggacccctgctccttgggctgaccgggtccttcttg

SEQ ID NO: 306 - DNA, 135 bp, Homo sapiens
ttttttttttttttttttttttttttagaattaaaagaaaaggcaatgtttattagctatttcataaatcttctctgaaaagttctcaattcttctcactgaaacttgtaagcaactgagcagcttctgtctgta

SEQ ID NO: 307 - DNA, 418 bp, Homo sapiens
  misc_feature (1)...(418): n=a,t,g or c
tttccaaatcttcatatttatttccacagtgttaacatggaatagacttagcaaccattgcagagaaaaaaaaaatctctcattggtttatgagttaaatcctgtaacaatgaatttcaaccattcgaagtcttctgctgcttaacatttactgaatcaaaggctgaagtaaatgggactctcatctagggtctcaggaaatcacacagctgggcctcgtgatgtatttacggatgggggattttaacttcttaatacaagggcaagtttgacaggttacagcccaatggaggtgcacggctctggtacanggggtttcttggnccctaacattcaaaggggcattttcatgggtcctggtttaattcttngggcctcggggggnccaatttccccatggggggggccggttttnatt

SEQ ID NO: 308 - DNA, 441 bp, Homo sapiens; identical to SEQ ID NO: 97

SEQ ID NO: 309 - DNA, 450 bp, Homo sapiens
ttcatttttttgtgtcatcaaatctcatgatcagtttccctttaaagttaacctggtagtgctggttcagaagagcagcttttgcatgcccaatgtgtaagtaaccactggcctctggaggaaatctgacggtaacctttcccatctacgcacctggaagctcaacaaatttcccaacatcttgctttttctcaggtgccactcgagctttggttgttgaaacatcccacttgggtacctactgactggaaggcctgctgggcttcaagaaagccaaaccaacgttttacatgaactgggagctttcttctgtttcaactgttcttgccaggggagccatttcccttttagggggtgggccccaaacacaataaatcctggcttaaactcaagggaggtttcccaactaaggtatggttctcaggaggacagggcaatggattgaggttt

SEQ ID NO: 310 - DNA, 488 bp, Homo sapiens; identical to SEQ ID NO: 98

SEQ ID NO: 311 - DNA, 390 bp, Homo sapiens
ggctttcataattatatttttcttttaaagaaaaatatcaacccattgtcaatgcactgtttttcaaagcatttaaatagagggtaaaaccctttggaaattaatacagaagaaatgattcactttatgcataaaaaataaataataatatagctgagacatgtggtttgcttctgctcttgaagatgtgaacagcttctaagcattcattttctctgacccatacaacagcttctcagtgatacagggtttaatttaaacacatacaatgtccacccccaaaccttctgcccacatctacaagttttatttattttgtgggttttcagggtgactaagtttttccctacattgaaaagagaagttgccaaaaggtgcacaggaaatcat

SEQ ID NO: 312 - DNA, 484 bp, Homo sapiens; identical to SEQ ID NO: 99

SEQ ID NO: 313 - DNA, 287 bp, Homo sapiens
ttttttttttttttttttttttctatctgtgaaaaacatttattctgagaatctaaaatctggacaaagtactggactttagaaaaagcctacacaaaattgtctcattcttccctaatacattaataatctaagaataaggaggtgaaaaaaaccctttaaaaataacattgctccagtttgtctgcaggtatgtgatttaaaatatccctgttttattgaggtataggctgcaaactttggtaaaattaggaaaaattaacaaaccctttcaaaagaaaaaaaat

SEQ ID NO: 314 - DNA, 401 bp, Homo sapiens; identical to SEQ ID NO: 100

SEQ ID NO: 315 - DNA, 533 bp, Homo sapiens; identical to SEQ ID NO: 101

SEQ ID NO: 316 - DNA, 384 bp, Homo sapiens; identical to SEQ ID NO: 104

SEQ ID NO: 317 - DNA, 446 bp, Homo sapiens
tttttttttaccctggatgatgattaccattgttgctaatagtttttatctaagtaagcctatgcttgatttctttcagaaaccatttcattggatatcattttttctaaggtttcatttctcccaagtttgtttttttcaataggatagtcagttgacaaaatgtttggcattcttatactatttattgtttacatttaaaattaggtgcaaacagctagtttctcaaatgacctcctaattgactttttttctttaagataaaagtattggttgaggcactggtttataagcatttgtggactttgcagccttatctttaaaaaaaaaaaaattaaaactgtggtccttaaatatcctgtctgaactttggattggaaggcacatttccctttgttattggctatgtagattagcttagaatctgtaagcatatagtgtggtta

SEQ ID NO: 318 - DNA, 470 bp, Homo sapiens
tttttcaggatgtgacaacgtttttaatgcaaagtcaaccattagcatctttcccatgtacttattagatgtgaaatggcaggacttcacggccccgtttgcatattttcctactccgcagacgaataatattttcagggaaggcagcgcagtctgtgccgtcacaatcgggcgactgtgggtgatgagggatgatgattttccaggaggccctggggtcagaggactcctagagggagtttccagcccctcaatcgcagatggatggcctgttgatgttgtaactggggtggaagttgagccggtcacaggaggtgatgcagttatcggggccagtcacgatgcttttctccaggtaaacattgagagtattgttccggaacattccacccgctgcaagttgttgggaaaatttattcgaatttggataaaatactttaggcatctcgtgcacggtgggggctctgctc

SEQ ID NO: 319 - DNA, 401 bp, Homo sapiens
agtcccagagccagtgtttattagcaagatggaacccaaaggcggctgtggcctgggcagcagaaggccaccaggagcccccacccatctacccaactgccccccagagctaattacatccacacccatcccctgaagtggtggacataagggagccctggggagcctctaccggccccaggcctctaccacggaccccctcccctcagagctggggcctcccgtcagctctgcctgggcctggccctctgctatgctcccagcctctgagtcaaagtggcacagggaaagctaaggaggtagagtggggtggccctgcctggccaggcggggaggggagaaggggctgaaggggctgtcccacccaggcaggatgctcttctcctatccccaataaatag

SEQ ID NO: 320 - DNA, 403 bp, Homo sapiens; identical to SEQ ID NO: 107

SEQ ID NO: 321 - DNA, 225 bp, Homo sapiens
ttaagaacaaagcggaggggtttattatagggacattctgaaaccacaacggaaaagatgtccgtacaggtggatggggatggagatccagcgtcggagtacacagacttcagggggcctcctgcctggcacgttcgttcgtctcccgtatcgccgtaagaccctgagaccccgagcctctgcaggagagacgcacaaagaagcctcctccctgtggcctggctc

SEQ ID NO: 322 - DNA, 253 bp, Homo sapiens; identical to SEQ ID NO: 108

SEQ ID NO: 323 - DNA, 345 bp, Homo sapiens
gggttaaatatttattaggtttgttttaatcaggaataaatacatgatttagcaaagtgtaatgcttcccactgagaaatccctctgggtgctccccaaatgttccaatcacattcgtcacaacggaaaacaacacataagatactgtgcagacatctggagttcagggggtcacctgccttatgcgggaagtcaatgtccacagtgttacattcatttctcatacgttggctggttcctttgaaatagccttttggaacggttggggaaaccacagatgtctccttgtataaacacactagaatctatgatacagaaaactgtgtaactgcacatacacatacc

SEQ ID NO: 324 - DNA, 382 bp, Homo sapiens; identical to SEQ ID NO: 110

SEQ ID NO: 325 - DNA, 519 bp, Homo sapiens; identical to SEQ ID NO: 111

SEQ ID NO: 326 - DNA, 393 bp, Homo sapiens
aaattaaataaacttttattttggaatgatactagatttacagagaagttgcagagatagtacaaagagttcctgtatacccttcacccagcctaccccaaggtcaacatcttacatcaccatggtacatctgtcaaaaccaagggactgaaattggtatattaactaaaattcagacttttttcagatttccaattttcccactaatgtcctgtttttgttccaagacccaatccaggatgccacattgcactgaagacactctcccttttcaattctattactggtcacctcagtcaactttcccggggaaagagaatgcatgggaaaagctcttgtccttattattgaactggagaaactgaggcttaaaagtgccgagtgaccaagttc

SEQ ID NO: 327 - DNA, 277 bp, Homo sapiens
tgccgtccyccycccagsgtgcctggcatggtcgcaggggagcgggtbcctggagtcccggtgacaccacggggcacactgagggagctgaggagccggggccgcgcasctcctggdtgctcagcggatcgtgtacttktcccacttcttttcagggtcgtagggttcccagcggctggcgggaaagatgtgcttkttcttctcgtaccagctcctcagcaccaccttgcctgcatgggrctcatccttctccacagtgggsgtcactgagcaaccg

SEQ ID NO: 328 - DNA, 204 bp, Homo sapiens
  misc_feature (1)...(204): n=a,t,g or c
actggagtcttctgagatcttattaaatgttttatttcttaacattcctacatattaataaatgtcctatttcttaacctgatagtgggtacatgaatgtttatnattctgtaaatcatattgtgcttatgaatngtttcacaattaaaaaaaaaattcatcccacctattcccnttgcncaggttccatgctcattaaagacc

SEQ ID NO: 329 - DNA, 410 bp, Homo sapiens
  misc_feature (1)...(410): n=a,t,g or c
ctcataaacaannantttattaaantacatgttacataaaagaacatataaatggaccattaaatacattcagtttattttaaacaaatttacatagatacttatttacatttctccattgtattcttaaattatttttccaagcttactaccgataaanggtaatacaatgatcatctgctcacacagatgcatagagaagttgtccacagggctnagtaaagcaccacttcccagggtnacacngcttattagatcttccagcaacaactcatgctgaaggtgctctcttctgaggcagcccttgagggtgaggcttttgctttaggaggttgctggggggttgggttctgagggagctgacccggggcagcggatggggtccttgctgntttgacccgacttgggac

SEQ ID NO: 330 - DNA, 319 bp, Homo sapiens
  misc_feature (1)...(319): n=a,t,g or c
tttttttttgttgagcagttgtttattctggccctcacagccttggtagttccacaaaggccctggggatggggaacaggctacaggaacccacctgtcttcctggtcagggcccctggcctnagncagcaggccaatcctggtngggcacagggttctgtgctgttggctgcctacctctgaatatcctggccagcaagccatgccttccccgcccctgggccctgggagccnttnagctcctntccccataatgggtcctgggcctaggatgaggggaaggtcccagtttcttgtagggtnttatctaggggtnctg

SEQ ID NO: 331 - DNA, 348 bp, Homo sapiens
  misc_feature (1)...(348): n=a,t,g or c
aanttgtattttttgtagagatggggttttaccatgttgggtaggctggtctcaaactcgtgagctcaggtgatccacccgcctcagcctccaaaagtgctgggattacaggtgtgagccaccacacctggccaatgggcatnttctttggttgaattttaaaatattattttttatcatttaccattttctagggcattttaagacccaatttattctgccacaatcatgtcatcagaatagtcaaatgaaatgactttcatttgaattctcactattaagatttaaaattgtggaaaactaaagtggggattggagtagactgttagggattagntcctaggatgg

SEQ ID NO: 332 - DNA, 419 bp, Homo sapiens
  misc_feature (1)...(419): n=a,t,g or c
ngagccagaaaaggattttttttaattcaagtaactgaaataggaaaccagagggggagccccaggctgggataaatcatggctacccctccccaacagaacagggggaggaggtggcccctacacccattatggtcgattcgggcccccttgctcactctgctgcagcatcctagaggcagggccccaccttccctgggactggggtagtcggtcacccagcctgcattgccccagcccctnttccccacaaagagtatcttgggggagggnttcgtggggcagaacaggagggcaatgagggatgaacattgctcaaactcctttcaaaggggcacctgaccgcacaggggaggntgggcaggaagggcaagggntgggggatgccgtntaaggagggcggangcaggcanttttgg

SEQ ID NO: 333 - DNA, 353 bp, Homo sapiens; identical to SEQ ID NO: 114
  misc_feature (1)...(353): n=a,t,g or c

SEQ ID NO: 334 - DNA, 195 bp, Homo sapiens; identical to SEQ ID NO: 115
  misc_feature (1)...(195): n=a,t,g or c

SEQ ID NO: 335 - DNA, 295 bp, Homo sapiens
  misc_feature (1)...(295): n=a,t,g or c
ntnaaatgtgtaatataaatttattctgtgacattttcctcattgagagatattttaacatagattaaaatacatcaatatttcatgaaaaataaattctagaagaatttagataatatctgtaatgtacatgatttgaccctgaatatcctnttcgtnttncacttcaaacatcattttttaaaaagtaacataaacatgataaggactgcaacattcttcatatatcttgngtctcataaattttaattcaactgcccgttcttttcncaactatgtatgttaatggtatttg

SEQ ID NO: 336 - DNA, 441 bp, Homo sapiens
  misc_feature (1)...(441): n=a,t,g or c
aacttgttaaacacatttattgatttcttgacagtaaccaaacacagtgagtgaccattataaacaagaaaagaaaggcattcgttttgtactttgtgagatctggctgcacctggagagaaaacatacccctttcccaggaacttacaaggcaaagtgcattccttcacgggagcatcacaggggggcatggcagttttgaaacgcaagaagtctgtcgcctgctatctcaggctgaagctcacctcatgtgaatgattgagccatggacgtggaattaaagtcatacttgcttagcaaatgcattcctgattgccacaaactcagtaaaaactggctgcaaatgaacaaaacatgtagatgaaggaacaagtgaaatcaaagaatgcagttgcatggagccagggcttagcctgtaaggaaggagaacagaccanagcc

SEQ ID NO: 337 - DNA, 437 bp, Homo sapiens; identical to SEQ ID NO: 116
  misc_feature (1)...(437): n=a,t,g or c

SEQ ID NO: 338 - DNA, 178 bp, Homo sapiens
aatacagggtctcactctgttgtgccagctggagtgtagcagcacaattgtagttaactgcagcttttaactcctgggcttaagaaaaggttaagagatcctcttgcctcagctttctgagtagctaggactacaggtaagtaccaccaggtctggctaattttaaaatttttttgtt

SEQ ID NO: 339 - DNA, 575 bp, Homo sapiens
  misc_feature (1)...(575): n=a,t,g or c
tttttaaatagagatgaggttttgctatgttgcccaggctggtctcctggactcaagcaatctcccacttcaggctaccaaagtgctgggatttacaggcatgagcacctctcccagtctcagttattattttaataaatgagactgaacgtcctcttataaggctcactcccttgttcctactacatttgctctgtttaagtatctctttaaattcttcagttaagatcatcccttttatcagaaacctagacaccacaaagtagctttctcacctttaattctccatagggatcactattatactataatatttgcatacgtatgtgtatatatgtatttgcttttttaaaaaagtaaaaatgctcttctcactctttgtcgatataggcacccaggtacgtagttagaaattaaataaaggccacaataatttcccaagggaagatcattaaaaagaaaaatcctttcttcctctaatatcacatagctgggccttatggnatgcagctaagaaaaagggattgcctnggtgacaggaagaccaatcttcncccttggggtgtagnggaatt

SEQ ID NO: 340 - DNA, 472 bp, Homo sapiens
  misc_feature (1)...(472): n=a,t,g or c
tttttttgttcttctataccatttaattaaatatgagatggttattacatacattgtacgcttatatactaagcagctctgcganaatgtttgtaatgcatgtggatagtacacggtcaaatcagagatcttcactgtagtgaacaatggatattttaaagaatagtcccaacaataaaccacagagctgacaaaaatgccacctaatctgcatcatttccaggagctctgccacatattcttcctggcccgtaccaagtctcttagcccctctagaagagctgagaaaatgcaggtgtgcacctctgaacagcccatacttggcttttctgaagcaaattcccatggaaaccacattgaaggaagaggcaaaggctggtaggaaatcagctgaangctgggtgccctagacccagtcatgtttgttggccaattagctggcttttcattncatgctatatagaactggcag

SEQ ID NO: 341 - DNA, 366 bp, Homo sapiens; identical to SEQ ID NO: 117
  misc_feature (1)...(366): n=a,t,g or c

SEQ ID NO: 342 - DNA, 295 bp, Homo sapiens; identical to SEQ ID NO: 118
  misc_feature (1)...(295): n=a,t,g or c

SEQ ID NO: 343 - DNA, 281 bp, Homo sapiens
  misc_feature (1)...(281): n=a,t,g or c
caaggttcnaanggtttattagggagtcgggagggagaaaacccagggagtcccccaggccatccacattgctccccggcatgtgacgatccagcctgggctttctctgggtcctttctggacagaggctggccaagcaggcagcagcctcaaggggagtgggtaggagctgggggccttctggcagccctactcagaggatgatctggttggtgaagcttcggctcagctccttgtgtggcagaacantcgagttcaggatgagcacctcggcagggatc

SEQ ID NO: 344 - DNA, 382 bp, Homo sapiens; identical to SEQ ID NO: 120
  misc_feature (1)...(382): n=a,t,g or c

SEQ ID NO: 345 - DNA, 404 bp, Homo sapiens; identical to SEQ ID NO: 121

SEQ ID NO: 346 - DNA, 391 bp, Homo sapiens
  misc_feature (1)...(391): n=a,t,g or c
tantnntccagctcttttattgagatcagtggtggctctgaaaagcgtntttngggttttagaagtaggcgttcgctaatttcttcttgggcgccgcttcttaggcttgacaaccttgggcttagcggccttggnttcacagccttagcagcacttttggcagctttcttgggcttcgcaaccttggccttctttgggctcttagcactttcttggttacagtggccgcggcggctntcttcgctttcttcggngttttcttagcgctcttcttcggagttgcgccgccagccgcccttcttgggcttcttggctnccccaactggcttcttaggtttgggtccgcccgccttttnaaccntggggcttggncttccccggagcttgcctt

SEQ ID NO: 347 - DNA, 431 bp, Homo sapiens; identical to SEQ ID NO: 122
  misc_feature (1)...(431): n=a,t,g or c

SEQ ID NO: 348 - DNA, 18596 bp, Homo sapiens; identical to SEQ ID NO: 124

SEQ ID NO: 349 - DNA, 3493 bp, Homo sapiens; identical to SEQ ID NO: 125

SEQ ID NO: 350 - DNA, 836 bp, Homo sapiens; identical to SEQ ID NO: 126

SEQ ID NO: 351 - DNA, 5404 bp, Homo sapiens; identical to SEQ ID NO: 130

SEQ ID NO: 352 - DNA, 4121 bp, Homo sapiens; identical to SEQ ID NO: 131

SEQ ID NO: 353 - DNA, 4792 bp, Homo sapiens; identical to SEQ ID NO: 132

SEQ ID NO: 354 - DNA, 1685 bp, Homo sapiens; identical to SEQ ID NO: 133

SEQ ID NO: 355 - DNA, 2334 bp, Homo sapiens; identical to SEQ ID NO: 134

SEQ ID NO: 356 - DNA, 3220 bp, Homo sapiens; identical to SEQ ID NO: 137

SEQ ID NO: 357 - DNA, 835 bp, Homo sapiens; identical to SEQ ID NO: 138

SEQ ID NO: 358 - DNA, 840 bp, Homo sapiens; identical to SEQ ID NO: 139

SEQ ID NO: 359 - DNA, 2439 bp, Homo sapiens; identical to SEQ ID NO: 140

SEQ ID NO: 360 - DNA, 1488 bp, Homo sapiens; identical to SEQ ID NO: 142

SEQ ID NO: 361 - DNA, 2806 bp, Homo sapiens
ggatccaggactgagatcccagaaccatgaacctggccatcagcatcgctctcctgctaacaggtacccggcatggggcaggactggggctccaggcgccctggcttccttccctccagagaagcagcttctccctcacagtctcagaaaagcgcaggtgacaaagagagggctctttttcatcctgaagtcagccgatccaccgcgctgatattctgacggcctgaggtggtttttggaaacacagtttgctgagccctccttcacactattgaactagaatccccaactgagaacccaggaaccagcatcaactccctaagatctcctgtccttgaaacacattgataggatccaaggctcaagcagagtggggagggaggctggggtctgcaaaggagaagtgggatccctggggtggggaaaggcactcagagagcagaccccggtcccctccctagccaggcccatctctccacttcaggtgggtgggaggcccctgtgccgcaggcccctccagtttgaaggaggcactgctggtgccagtcttgcaggtctcccgagggcagaaggtgaccagcctaacggcctgcctagtggaccagagccttcgtctggactgccgccatgagaataccagcagttcacccatccagtacgagttcagcctgacccgtgagacaaagaagcacgtgctctttggcactgtgggggtgcctgagcacacataccgctcccgaaccaacttcaccagcaaataccacatgaaggtcctctacttatccgccttcactagcaaggacgagggcacctacacgtgtgcactccaccactctggccattccccacccatctcctcccagaacgtcacagtgctcagaggtgagacaagcccctaacaaggtcaagtgagctgggagagccaggctcggggacagcaggcagttcccttggctggactagagaggagaatagccccataacgctctcaccctctcccaactgctgcctggtcaactggggaaccattgccttcggtgtgaatggggtgaagagctcagggccagacaggcagagcagtgtggttccaccagaactgtgggcaaggcctttggcccctaatcttccttctcccagcgggaaacagggatgacaccacctccctcagccagttttcttgtcatgatgtttagtaaggttttcataagatgatatgtgtgcaagagatcagtaatctgcaaatgggaaagatggctggttctgtgagaccaggctgttcctggtcccagctaagacattgcagtacccacctcccaaagggagtacacccttgctttgggcctgtgcctgcctgagtcctgatccgtcttccttcctaccctgcccccggcccccttctctttctgcagacaaactggtcaagtgtgagggcatcagcctgctggctcagaacacctcgtggctgctgctgctcctgctgtccctctccctcctccaggccacggatttcatgtccctgtgactggtggggcccatggaggagacaggaagcctcaagttccagtgcagagatcctacttctctgagtcagctgaccccctccccccaatccctcaaaccttgaggagaagtggggaccccacccctcatcaggagttccagtgctgcatgcgattatctacccacgtccacgcggccacctcaccctctccgcacacctctggctgtctttttgtactttttgttccagagctgcttctgtctggtttatttaggttttatccttccttttctttgagagttcgtgaagagggaagccaggattggggacctgatggagagtgagagcatgtgaggggtagtgggatggtggggtaccagccactggaggggtcatccttgcccatcgggaccagaaacctgggagagacttggatgaggagtggttgggctgtgctgggcctagcacggacatggtctgtcctgacagcactcctcggcaggcatggctggtgcctgaagaccccagatgtgagggcaccaccaagaatttgtggcctaccttgtgagggagagaactgaggatctccagcattctcagccacaaccaaaaaaaaataaaaagggcagccctccttaccactgtggaagtccctcagaggccttggggcatgacccagtgaagatgcaggtttgaccaggaaagcagcgctagtggagggttggagaaggaggtaaaggatgagggttcatcatccctccctgcctaaggaagctaaaagcatggccctgctgcccctccctgcctccacccacagtggagagggctacaaaggaggacaagaccctctcaggctgtcccaagctcccaagagcttccagagctctgacccacagcctccaagtcaggtggggtggagtcccagagctgcacagggtttggcccaagtttctaagggaggcacttcctcccctcgcccatcagtgccagcccctgctggctggtgcctgagcccctcagacagccccctgccccgcaggcctgccttctcagggacttctgcggggcctgaggcaagccatggagtgagacccaggagccggacacttctcaggaaatggcttttcccaacccccagcccccacccggtggttcttcctgttctgtgactgtgtatagtgccaccacagcttatggcatctcattgaggacaaagaaaactgcacaataaaaccaagcctctggaatctgtcctcgtgtccacctggccttcgctcctccagcagtgcctgcctgcccccgctt

SEQ ID NO: 362 - DNA, 634 bp, Homo sapiens; identical to SEQ ID NO: 144

SEQ ID NO: 363 - DNA, 13500 bp, Homo sapiens; identical to SEQ ID NO: 145
  misc_feature (1)...(13500): n=a,t,g or c

SEQ ID NO: 364 - DNA, 2206 bp, Homo sapiens; identical to SEQ ID NO: 149

SEQ ID NO: 365 - DNA, 1539 bp, Homo sapiens
gaattcggggggagggggcagtgtcctccgagccaggacaggcatgttgttgggactggcggccatggagctgaaggtgtgggtggatggcatccagcgtgtggtctgtggggtctcagagcagaccacctgccaggaagtggtcatcgcactagcccaagcaataggccagactggccgctttgtgcttgtgcagcggcttcgggagaaggagcggcagttgctgccacaagagtgtccagtgggcgcccaggccacctgcggacagtttgccagcgatgtccagtttgtcctgaggcgcacagggcccagcctagctgggaggccctcctcagacagctgtccacccccggaacgctgcctaattcgtgccagcctccctgtaaagccacgggctgcgctgggctgtgagccccgcaaaacactgacccccgagccagcccccagcctctcacgccctgggcctgcggcccctgtgacacccacaccaggctgctgcacagacctgcggggcctggagctcagggtgcagaggaatgctgaggagctgggccatgaggccttctgggagcaagagctgcgccgggagcaggcccgggagcgagagggacaggcacgcctgcaggcactaagtgcggccactgctgagcatgccgcccggctgcaggccctggacgctcaggcccgtgccctggaggctgagctgcagctggcagcggaggcccctgggcccccctcacctatggcatctgccactgagcgcctgcaccaggacctggctgttcaggagcggcagagtgcggaggtgcagggcagcctggctctggtgagccgggccctggaggcagcagagcgagccttgcaggctcaggctcaggagctggaggagctgaaccgagagctccgtcagtgcaacctgcagcagttcatccagcagaccggggctgcgctgccaccgcccccacggcctgacaggggccctcctggcactcagggccctctgcctccagccagagaggagtccctcctgggcgctccctctgagtcccatgctggtgcccagcctaggccccgaggtggcccccatgacgcagaactcctggaggtagcagcagctcctgccccagagtggtgtcctctggcagcccagccccaggctctgtgacagcctagtgagggctgcaagaccatcctgcccggaccacagaaggagagttggcggtcacagagggctcctctgccaggcagtgggaagccctgggtttggcctcaggagctgggggtgcagtgggggactgccctagtccttgccaggtcgcccagcaccctggagaagcatggggcgtagccagctcggaacttgccaggccccaaaggccacgactgcctgttggggacaggagatgcatggacagtgtgctcaagctgtgggcatgtgcttgcctgcgggagaggtccttcactgtgtgtacacagcaagagcatgtgtgtgccacttcccctaccccaacgtgaaaacctcaataaactgcccgaagc

SEQ ID NO: 366 - DNA, 1424 bp, Homo sapiens
aggagccttaggaggtacggggagctcgcaaatactccttttggtttattcttaccaccttgcttctgtgttccttgggaatgctgctgtgcttatgcatctggtctctttttggagctacagtggacaggcatttgtgacagcactatgggactgagtaacattctctttgtgatggccttcctgctctctggtgctgctcctctgaagattcaagcttatttcaatgagactgcagacctgccatgccaatttgcaaactctcaaaaccaaagcctgagtgagctagtagtattttggcaggaccaggaaaacttggttctgaatgaggtatacttaggcaaagagaaatttgacagtgttcattccaagtatatgggccgcacaagttttgattcggacagttggaccctgagacttcacaatcttcagatcaaggacaagggcttgtatcaatgtatcatccatcacaaaaagcccacaggaatgattcgcatccaccagatgaattctgaactgtcagtgcttgctaacttcagtcaacctgaaatagtaccaatttctaatataacagaaaatgtgtacataaatttgacctgctcatctatacacggttacccagaacctaagaagatgagtgttttgctaagaaccaagaattcaactatcgagtatgatggtattatgcagaaatctcaagataatgtcacagaactgtacgacgtttccatcagcttgtctgtttcattccctgatgttacgagcaatatgaccatcttctgtattctggaaactgacaagacgcggcttttatcttcacctttctctatagagcttgaggaccctcagcctcccccagaccacattccttggattacagctgtacttccaacagttattatatgtgtgatggttttctgtctaattctatggaaatggaagaagaagaagcggcctcgcaactcttataaatgtggaaccaacacaatggagagggaagagagtgaacagaccaagaaaagagaaaaaatccatatacctgaaagatctgatgaagcccagcgtgtttttaaaagttcgaagacatcttcatgcgacaaaagtgatacatgtttttaattaaagagtaaagcccatacaagtattcattttttctaccctttcctttgtaagttcctgggcaacctttttgatttcttccagaaggcaaaaagacattaccatgagtaataagggggctccaggactccctctaagtggaatagcctccctgtaactccagctctgctccgtatgccaagaggagactttaattctcttactgcttcttttcacttcagagcacacttatgggccaagcccagcttaatggctcatgacctggaaataaaatttaggaccaataaaaaaaaaaaaaaaaaaaa

SEQ ID NO: 367 - DNA, 2814 bp, Homo sapiens
aagaacgcccccaaaatctgtttctaattttacagaaatcttttgaaacttggcacggtattcaaaagtccgtggaaagaaaaaaaccttgtcctggcttcagcttccaactacaaagacagacttggtccttttcaacggttttcacagatccagtgacccacgctctgaagacagaattagctaactttcaaaaacatctggaaaaatgaagacttgggtaaaaatcgtatttggagttgccacctctgctgtgcttgccttattggtgatgtgcattgtcttacgcccttcaagagttcataactctgaagaaaatacaatgagagcactcacactgaaggatattttaaatggaacattttcttataaaacattttttccaaactggatttcaggacaagaatatcttcatcaatctgcagataacaatatagtactttataatattgaaacaggacaatcatataccattttgagtaatagaaccatgaaaagtgtgaatgcttcaaattacggcttatcacctgatcggcaatttgtatatctagaaagtgattattcaaagctttggagatactcttacacagcaacatattacatctatgaccttagcaatggagaatttgtaagaggaaatgagcttcctcgtccaattcagtatttatgctggtcgcctgttgggagtaaattagcatatgtctatcaaaacaatatctatttgaaacaaagaccaggagatccaccttttcaaataacatttaatggaagagaaaataaaatatttaatggaatcccagactgggtttatgaagaggaaatgcttcctacaaaatatgctctctggtggtctcctaatggaaaatttttggcatatgcggaatttaatgataaggatataccagttattgcctattcctattatggcgatgaacaatatcctagaacaataaatattccatacccaaaggctggagctaagaatcccgttgttcggatatttattatcgataccacttaccctgcgtatgtaggtccccaggaagtgcctgttccagcaatgatagcctcaagtgattattatttcagttggctcacgtgggttactgatgaacgagtatgtttgcagtggctaaaaagagtccagaatgtttcggtcctgtctatatgtgacttcagggaagactggcagacatgggattgtccaaagacccaggagcatatagaagaaagcagaactggatgggctggtggattctttgtttcaagaccagttttcagctatgatgccatttcgtactacaaaatatttagtgacaaggatggctacaaacatattcactatatcaaagacactgtggaaaatgctattcaaattacaagtggcaagtgggaggccataaatatattcagagtaacacaggattcactgttttattctagcaatgaatttgaagaataccctggaagaagaaacatctacagaattagcattggaagctatcctccaagcaagaagtgtgttacttgccatctaaggaaagaaaggtgccaatattacacagcaagtttcagcgactacgccaagtactatgcacttgtctgctacggcccaggcatccccatttccacccttcatgatggacgcactgatcaagaaattaaaatcctggaagaaaacaaggaattggaaaatgctttgaaaaatatccagctgcctaaagaggaaattaagaaacttgaagtagatgaaattactttatggtacaagatgattcttcctcctcaatttgacagatcaaagaagtatcccttgctaattcaagtgtatggtggtccctgcagtcagagtgtaaggtctgtatttgctgttaattggatatcttatcttgcaagtaaggaagggatggtcattgccttggtggatggtcgaggaacagctttccaaggtgacaaactcctctatgcagtgtatcgaaagctgggtgtttatgaagttgaagaccagattacagctgtcagaaaattcatagaaatgggtttcattgatgaaaaaagaatagccatatggggctggtcctatggaggatacgtttcatcactggcccttgcatctggaactggtcttttcaaatgtggtatagcagtggctccagtctccagctgggaatattacgcgtctgtctacacagagagattcatgggtctcccaacaaaggatgataatcttgagcactataagaattcaactgtgatggcaagagcagaatatttcagaaatgtagactatcttctcatccacggaacagcagatgataatgtgcactttcaaaactcagcacagattgctaaagctctggttaatgcacaagtggatttccaggcaatgtggtactctgaccagaaccacggcttatccggcctgtccacgaaccacttatacacccacatgacccacttcctaaagcagtgtttctctttgtcagactaaaaacgatgcagatgcaagcctgtatcagaatctgaaaaccttatataaacccctcagacagtttgcttattttattttttatgttgtaaaatgctagtataaacaaacaaattaatgttgttctaaaggctgttaaaaaaaagatgaggactcagaagttcaagctaaatattgtttacattttctggtactctgtgaaagaagagaaaagggagtcatgcattttgctttggacacagtgttttatcacctgttcatttgaagaaaaataataaagtcagaagttcaaaaaaaaaaaaaaaaaaaaaaaaagcggccgctcg

SEQ ID NO: 368 - DNA, 3143 bp, Homo sapiens; identical to SEQ ID NO: 156

SEQ ID NO: 369 - DNA, 1896 bp, Homo sapiens
gcggcggtggcggaggcggacacattggcgtgagacctgggagtacgttgtgccaaatcattgccacttgccacatgagtgtaaatgatggcggatgcaagtatgtcctctgccgatgggaaaagcgattatggcctgcgaaggtgacagccattattctgtaacttcaggacttagaaatgactttcgggtgacaagtaaaatcttgatcaggagatacctaggatttgcttcagtgaaataattgagccagaacacggttggcactgattctcgttccccatttaatggggttttggtctagtgcttccaaggttacacttccagaaatgtcttttttttttcacactaaaaaaaaaaaaaagaatcagctgtaaaaaggcatgtaaggctgtaactcaaggaaagatctggcaagcagccctgtgatagtaaattatggtcgtgttcagggaatgctttccagcaattcagtagacagtgctcagctgcaatgcaaaagcccaggtccttgtctttgtctgccactggcctctcatgcctcagtttccccatctgtgaaacaatggggattggaccaaatatctgaaatcccatggttataggccttcaggattacctgctgcatttgtgctaaagtttgccactgtttctcactgtcagctgttgtaataacaaggattttcttttgttttaaatgtaggttttggcccgaaccgcgacttcaacaaaaaataagagaagaaaggaatattttctagctgtgcaaatcctctccctagaggaaaagttaattgttgtgttgttttaatactgttttttcccgtgtagatttctgatacttcaatcccctactcccccaaaacagttgaagcccagcccactcttaatgggcttattcaccatttgtgtaattcattaatgctcataataacctcatgagaaagcaactagtttgattttatgtcagtttggaagctgaagatccaaacgaggcattctgtgagatctatggagagattggtacaaacactgaatacatgtaaattatactcagggtagaccctatttgtggttaaaatagggatatttccttttttttttttttttttttgactgtttcttaatcagtgccatgccaggaaaatagggatgtttccttcccagagatctgtgtgtcttttttcagaaacgtctgtgacaggcccatcaattttgaaatatttggtttttgagcctgtcactctaaaccagcgtttaacgttcaaaaggcaaataactgatgaccaggcggcacattgttctgctccgtgagtgtctggcactgggaaaggtgtagattgtctagaatgacagcaattccgacgccccagtcagtcctgcgtgattgtggcgagggcgcgtctggcaccgggaaggtgtagatcatctagaatgacggcgattccgacgccccggtcagtcctgcgtgattggcgagggtgcatctgtcgtgagaattcccagttctgaagagagcaaggagactgatcccgcgtagtccaaggcattggctcccctgttgctcttccttgtggagctccccctgccccactccctcctgcctgcatcttcagagctgcctctgaagctcgcttggtccctagctcacactttccctgcggctgggaaggtaattgaatactcgagtttaaaaggaaagcacatccttttaaaccaaaacacacctgctgggctgtaaacagcttttagtgacattaccatctactctgaaaatctaacaaaggagtgatttgtgcagttgaaagtaggatttgcttcataaaagtcacaatttgaattcatttttgcttttaaatccagccaaccttttctgtcttaaaaggaaaaaaaaaa

SEQ ID NO: 370 - DNA, 2827 bp, Homo sapiens
tggcgatgctactgtttaattgcaggaggtgggggtgtgtgtaccatgtaccagggctattagaagcaagaaggaaggagggagggcagagcgccctgctgagcaacaaaggactcctgcagccttctctgtctgtctcttggcacaggcacatggggaggcctcccgcaggtggggggccaccagtccaggggtgggagcactacagggcacgagttggtttgggagctgccagtctcctgggaggatcgcagtcagcagagcagggctgaggcctgggggtaggagcagagcctgcgcatctggaggcagcatgtccaagaaagggagtggaggtgcagcgaaggacccaggggcagagcccacgctggggatggaccccttcgaggacacactgcggcggctgcgtgaggccttcaactgagggcgcacgcggccggccgagttccgggctgcgcagctccagggcctgggccacttccttcaagaaaacaagcagcttctgcgcgacgtgctggcccaggacctgcataagccagctttcgaggcagacatatctgagctcatcctttgccagaacgaggttgactacgctctcaagaaccttcaggcctggatgaaggatgaaccacggtccacgaacctgttcatgaagctggactcggtcttcatctggaaggaaccctttggcctggtcctcatcatcgcaccctggaactacccattgaacctgaccctggtgctcctggtgggcaccctccccgcagggaattgcgtggtgctgaagccgtcagaaatcagccagggcacagagaaggtcctggctgaggtgctgccccagtacctggaccagagctgctttgccgtggtgctgggcggaccccaggagacagggcagctgctagagcacaagttggactacatcttcttcacagggagccctcgtgtgggcaagattgtcatgactgctgccaccaagcacctgacgcctgtcaccctggagctggggggcaagaacccctgctacgtggacgacaactgcgacccccagaccgtggccaaccgcgtggcctggttctgctacttcaatgccggccagacctgcgtggcccctgactacgtcctgtgcagccccgagatgcaggagaggctgctgcccgccctgcagagcaccatcacccgtttctatggcgacgacccccagagctccccaaacctgggccgcatcatcaaccagaaacagttccagcggctgcgggcattgctgggctgcggccgcgtggccattgggggccagagcaacgagagcgatcgctacatcgcccccacggtgctggtggacgtgcaggagacggagcctgtgatgcaggaggagatcttcgggcccatcctgcccatcgtgaacgtgcagagcgtggacgaggccatcaagttcatcaaccggcaggagaagcccctggccctgtacgccttctccaacagcagacaggttgtgaaccagatgctggagcggaccagcagcggcagctttggaggcaatgagggcttcacctacatatctctgctgtccgtgccattcgggggagtcggccacagtgggatgggccggtaccacggcaagttcaccttcgacaccttctcccaccaccgcacctgcctgctcgccccctccggcctggagaaattaaaggagatccgctacccaccctataccgactggaaccagcagctgttacgctggggcatgggctcccagagctgcaccctcctgtgagcgtcccacccgcctccaacgggtcacacagagaaacctgagtctagccatgaggggcttatgctcccaactcacattgttcctccagaccgcaggctcccccagcctcaggttgctggagctgtcacatgactgcatcctgcctgccagggctgcaaagcaaggtcttgcttctatctgggggacgctgctcgagagaggccgagaggccgcagaacatgccaggtgtcctcactcaccccaccctccccaattccagccctttgccctctcggtcagggttggccaggcccagtcacaggggcagtgtcaccctggaaaatacagtgccctgccttcttaggggcatcagccctgaacggttgagagcgtggagccctccaggcctttgctctcccctctaggcacacgcgcacttccacctctgccccatcccaactgcaccagcactgcctcccccagggatcctctcacatcccacactggtctctgcaccacccctctggttcacaccgcaccctgcactcacccacagcagctccatccactgggaaaactggggtttgcatcactccactgcacagtgttagtgggacctgggggcaagtcccttgacttctctgagcctcagtttccttatgtgaaagttgctggaaccaaaatggagtcacttatgccaaactctaataaaatggagtcgggggggcacatagaagccctcacacacacatgcccgtaacaggatttatcaccaagacacgcctgcatgtaagaccagacacagggcgtatggaaaagcacgtcctcaaagactgtagtattccagatgagctgcagatgcttacctaccacggccgtctccaccagaaaaccatcgccaactcctgcgatcagcttgtgacttacaaaccttgtttaaaagctgcttacatggacttctgtcctttaaaacgttccccttggctgtggccctctgtgtatgcctgggatccttccaagcactcatagcccagataggaatcctctgctcctcccaaataaattcatctgttc

SEQ ID NO: 371 - DNA, 2738 bp, Homo sapiens
cgcggaattccgcggaattccgcgccgccgccgccggcagaccccgcgctccggctccggctcggctcgctcggctccggtgcgcgccgaggccatgcagcgccggggcgccctgttcggcatgccgggcggcagcggaggcaggaagatggctgcaggagacatcggcgagctgctagtgccccacatgcccacgatccgcgtgcccaggtccggcgacagggtctacaagaacgagtgcgccttctcctacgactctcccaattctgaaggtggactctatgtatgcatgaatacatttttggcctttggaagggaacatgttgaaagacattttcgaaaaactggacagagtgtatacatgcacctgaaaagacatgcgcgagagaaggtaagaggggcgtctggtggagcgttaccaaaaaggaggaattccaagatttttttagatctagatactgatgacgatttaaatagcgacgattatgaatatgaagatgaagccaaacttgttatattcccagatcactatgaaatagcactaccaaatattgaggagttaccagccctggtaacaattgcttgtgatgcagttctcagctcaaaatctccatacagaaagcaggacccagacacgtgggaaaatgaattgccagtatctaaatatgccaacaacctcacccagctggacaatggagtcaggattcctccaagtggttggaagtgtgccagatgcgacctgcgagaaaacctctggttgaatctgactgacggctctgtcctgtgtggaaagtggttctttgacagctctgggggcaacgggcatgcgctggagcattacagagacatgggctacccactagccgtgaaactgggaaccatcactcctgacggggcagatgtttattcttttcaagaagaagaacctgttttggatcctcatttggccaagcacttagcgcattttggaattgatatgcttcatatgcatgggacagagaatgggctccaggacaatgacatcaagctgagggtcagtgagtgggaagtgatccaggagtcgggcacgaaactgaagccaatgtatggtcctggctacacgggtctgaagaacctgggcaacagctgctatctcagctctgtcatgcaggccatcttcagcatcccagaattccagagagcgtatgtaggaaaccttcccagaatatttgactactcgcctttagatccaacacaagatttcaacacacagatgactaagttaggacatggccttctctcaggccagtattcaaagcctccggtgaaatctgaactcattgaacaggtgatgaaggaggagcacaagccacagcagaacgggatctctccgcgcatgtttaaggcctttgtaagcaagagccacccggaattctcctctaacaggcagcaagatgcccaggaattcttcttgcacctggtgaatctagtagagaggaaccgcatcggctcagaaaacccaagcgatgtttttcgttttttggtggaagaacgcattcagtgctgtcagacccggaaagtccgctacacggagagggtggattacctgatgcagttacctgtggccatggaggcggcaaccaacaaggatgaactgatcgcttatgaactaacgagaagggaagcagaagcaaacagaagaccccttcctgagttggtacgtgccaagataccatttagtgcctgccttcaggccttctctgaaccagaaaatgttgatgatttctggagcagtgccctacaagcaaagtctgcgggtgtgaaaacatctcgctttgcttcattccctgaatacttggtagtgcagataaagaagttcacttttggtcttgactgggttcccaaaaaatttgatgtttctattgatatgccagacctacttgatatcaaccatctccgagccagggggttacagccaggagaggaagaacttccagacatcagcccccccatagtcattcctgatgactcaaaagatcgcctgatgaaccaattgatagacccatcagacatcgatgagtcatcagtgatgcagctggccgagatgggtttcccgctggaagcatgtcgcaaggctgtgtacttcactggaaatatgggcgccgaggtggccttcaactggatcattgttcacatggaagagccagattttgctgagccgctgaccatgcctggttatggaggggcagcttctgctggagcctctgtttttggtgcttctggactggataaccaacctccagaggaaatcgtagctatcatcacctccatgggatttcagcgaaatcaggctattcaggcactacgagcaacgaataataacctggaaagagcactggattggatctttagccaccctgagtttgaagaagacagtgattttgtgattgagatggagaataatgccaatgcaaacattatttctgaggccaagcccgaaggacctagagtcaaggatggatctggaacatatgagctatttgcattcatcagtcacatgggaacatccacaatgagtggtcattacatttgccatatcaaaaaggaaggaagatgggtgatttacaatgaccacaaagtttgtgcctcagaaaggccccctaaagacctgggctacatgtacttttaccgcaggataccaagctaaacctcaaatataaaaattggcgaaaagaagccatacgcctttttaatttgcc

SEQ ID NO: 372 - DNA, 1548 bp, Homo sapiens
aatgaaatgtgtacagcttgccgtgttctgactgtacccttccctcttccatgtctgagaatctccgtgtattttaagaatgtgtgaggagagggtggcgattcatgtttcaatgagcctcttttttttttttccttcctgttttggtctatggctggtcttactctgtgtccatgttcggaagctctagttttgcatagaattatagagatgccaaactctttgaaaagagatccaaatttatcgcttgagagaaagaaaagaaacactattttttgtattttacctgagatacaggggcacaaatagatgagaattttacagtgttagtgtatgtatccctgagcctaaaaaatgaggatataaccttttacagagagagtgaggcgtggtggttttatatttatatatgaaaggccagcaagctcatgcgaaggatatacttttcttccaaaaagcggatttttttttttttaatgtttgaatctatatttgagatgggagtttggttggattaaacatgacaccccggtgggcggtgtgtgtgtctgttgcacatggcagggaggggagcctccttctcatggggttgccatggtgatcattggtttttccatcaaaattgcatcttcatccatagattaccttccccttccctgacagtccataaccaaacctttaaacagaacaacctctttaaaaacttctcttgtgtttaacactttcttcatgccaacgaaacagggtaaacatgctcaaaacattaacagtctaaacagatatccaaatactaagaagaaaaacaagttatagcactttcaattttttttttttttttaaaaaaaggtttatagctttttcttttcccatgtcacaatgtccacttcctaagaagggtttaaaatactatgaaaactttctttttggggaaaatatctatttggtgtttgacacatcagtaggtactttaaagacctgaattttatagtagctttaggagttatattttataaaaatcagttatgactttatatttccagacaatagagagttcagtacatcatgctcttgtgcctctgcctgcttttcctgcgttcccaccctgtattccccccgcctttcgggtttccagggcttcgagcttgatcttttgaaagttttattctattaaatttttgctatatcttctggttttctgaaaaagctttagaatggtttctataccctttgtatcactgcatttttccatatcatctccggttcgatcgcgtccagatggaaaacggaagcagaggcttctaatcgtcgcatttactggctccagtgcaacacatccatctgaaaacactcggaagtctggtgcttggagagggtgccattgtctcttgtacataaggtcatgacgtgtctatgtcaaaagttcttatatatttcttttataagctgaaagaaggtctatttttatgtttttaggtctatgaatggaacgttgtaaatgcttgtcaaacaataaaaataacgaaaagtgaaaaaaaaaaaaaaaaaaaa

SEQ ID NO: 373 - DNA, 3768 bp, Homo sapiens; identical to SEQ ID NO: 164

SEQ ID NO: 374 - DNA, 1172 bp, Homo sapiens; identical to SEQ ID NO: 165

SEQ ID NO: 375 - DNA, 1550 bp, Homo sapiens; identical to SEQ ID NO: 166

SEQ ID NO: 376 - DNA, 1585 bp, Homo sapiens; identical to SEQ ID NO: 167

SEQ ID NO: 377 - DNA, 627 bp, Homo sapiens; identical to SEQ ID NO: 168

SEQ ID NO: 378 - DNA, 2161 bp, Homo sapiens; identical to SEQ ID NO: 169

SEQ ID NO: 379 - DNA, 2824 bp, Homo sapiens; identical to SEQ ID NO: 170

SEQ ID NO: 380 - DNA, 2436 bp, Homo sapiens
aaggcacctctgccgccacagaccttgcagttaactccgccctgacccacccttcccgatgcagtccctgatgcaggctcccctcctgatcgccctgggcttgcttctcgcgacccctgcgcaagcccacctgaaaaagccatcccagctcagtagcttttcctgggataactgtgatgaagggaaggaccctgcggtgatcagaagcctgactctggagcctgaccccatcgtcgttcctggaaatgtgaccctcagtgtcgtgggcagcaccagtgtccccctgagttctcctctgaaggtggatttagttttggagaaggaggtggctggcctctggatcaagatcccatgcacagactacattggcagctgtacctttgaacacttctgtgatgtgcttgacatgttaattcctactggggagccctgcccagagcccctgcgtacctatgggcttccttgccactgtcccttcaaagaaggaacctactcactgcccaagagcgaattcgttgtgcctgacctggagctgcccagttggctcaccaccgggaactaccgcatagagagcgtcctgagcagcagtgggaagcgtctgggctgcatcaagatcgctgcctctctaaagggcatataacatggcatctgccacagcagaatggagcggtgtgaggaaggtcccttttcctctgttttgtgtttgccaaggccaaactcccactctctgcccccctttaatcccctttctacagtgagtccactaccctcactgaaaatcattttgtaccacttacattttaggctggggcaagcagccctgacctaagggagaatgagttggacagttcttgatagcccagggcatctgctgggctgaccacgttactcatccccgttaacattctctctaaagagcctcgttcatttccaaagcagttaaggaatgggaaccagagtgttttaggacctgaagaatctttatgactctctctctttcactcttttttttttttgtcactaagttaaaagcgaagtgagagtattaacgtttttgttctcctccggccccctgttacaatgaaggggcaaaagtatttgctcttagtctattcctcccttaacttctgtgactaatttttatttcctttctagatttgcccaattaatactagggtgcagtgtatcctggagaggtagggtgtgtgggggaggaatcccttgggggagatattaggagtgctctgttgtttacaaactcacggtacccgcagggcctagcaagagacttaaatgactgataagaaccgtgagaaacatgttgcttccaggcttgatttcgatttttcgctttttttttttttgagacagaatctcactttgtcaccaggctggagtgcagtggtgcaatctcacctcactgcaacctccgcctcctgggttcaagcaattctcctgcctcagcctcccaagtagcttggactacaggccctgccaccacgcccggctaatttgtgtatttttagtagagatggggtttcaccatgttggccaggatggtctcgatctcttgacctcgtgatctgtccaccttggccttgcaaagcgctggattacaggcatgagccactacacccagccgatttttcctttttgattaaagatgctattacaatgtaaatatttcttacacagaaagtcacagcacatgtgcccattgatacaaggctgctgaggcctggtctccagttggaaatataattaagggtggcaaggactggagtcagttggagagtgcatagccagtctgtgaagacaactgccagatactggcaatactccagcctggtgacagagtgagactctgtctcaaaaaaaaagtttcaatgtttactcctagagaagccaaaaatccagatttgtatatgaaatcttaccattttaaaagattggcagctaattatttttttaaaaagctgtgcagtgtgatgtgtcccaaacggactggctcatgggtggccacgtcacaacctctgatctcagaccgtgcatgccttgtcctcttaagacaactcctgtggcaccgtttctccctccacagggccaaagccatagtgtccggtcccaaggacaaggctcttccagtgctaggagaggtatgagcagcctctcacctgtgagctgtggggatcacaaggctgcctgcctcagtcttggagtcctgttgggtgaatgaggcagatgggaaagagcctcaccagcagctgcttttggagcaggggtccaaggaagagagggtggcctcgacatcaaactgcctggatttttctaccaccctgttacatcataacaacttctgaaacacacaccagccctgagttctgggctcatttgaagcctggaatagcaataaatctttttaacttgcggacagtt

SEQ ID NO: 381 - DNA, 5434 bp, Homo sapiens; identical to SEQ ID NO: 172

SEQ ID NO: 382 - DNA, 1939 bp, Homo sapiens
cgcagagcagttcagttcgctcactcctcgccggccgcctctccttcgggctctcctcgcgtcactggagccatggcgttcgccgagacctacccggcggcatcctccctgcccaacggcgattgcggccgccccagggcggccggaggaaaccgggtgacggtggtgctcggtgcgcagtggggcgacgaaggcaaagggaaggtggtggacctgctggcgcaggacgccgacatcgtgtgccgctgccagggaggaaataatgctggccatacagttgttgtggattctgtggaatatgattttcatctcttacccagtggaataattaatccaaatgtcactgcattcattggaaatggtgtggtaattcatctacctggattgtttgaagaagcagagaaaaatgttcaaaaaggaaaaggactagaaggctgggaaaaaaggcttattatatctgacagagctcatattgtatttgattttcatcaagcagctgatggtatccaggaacaacagagacaagaacaagcaggaaaaaatttgggtacaacaaaaaagggcattggcccagtttattcgtccaaagctgctcggagtggactcaggatgtgcgaccttgtttctgactttgatggcttctctgagaggtttaaagttctagctaaccaatacaaatctatataccccactttggaaatagacattgaaggtgaattacaaaaactcaagggttatatggaaaagattaaaccaatggtgagagatggagtttattttctatatgaggccctacatggaccaccaaagaaaatcttggtagaaggtgcaaatgcagcactattagatattgattttgggacttacccttttgtaacctcttcaaattgtactgttggaggtgtttgtactggtttgggtatgccacctcaaaatgttggagaagtgtatggagttgtgaaagcttatacaactagagttggtattggtgcctttcctacagagcaagacaatgaaattggagaattattacaaacaaggggtagagagtttggtgtaactactggaaggaaaagaagatgtggctggttggacctcgttttgctcaaatatgctcatatgatcaatggatttactgcgttggcacttaccaagttggatattttggacatgtttacggaaatcaaagttggagttgcttacaagttagatggtgaaatcatacctcatatcccagcaaaccaagaagtcttaaataaagttgaagttcaatataagactctcccaggatggaacacagacatatcaaatgcaagggcgtttaaagaactacctgttaatgcacaaaactatgttcgatttattgaagatgagcttcaaattccagttaagtggattggtgttggtaaatccagagaatctatgattcaactcttttaatgattgccagtaatgcaagaaacactccttgagagggaggggaaaagactttctaaatatttcatttatgacctgcaaattcaagaataaagacactgaagtaagtttgaagcctctacagttgtttccagtcttttcagatggatgcctactgtggagattaactttggcatattccagtgtcagctttctttagctggaattgccaaatcatttgttgctcctgctgctctcatggtgccacgtttttttttttcaatgtttagtaatagtataatccatgttgtttgatatcaaaagtagaattacttttatgtagttttcttcattattgtcattgcgtgttcttaagttttacccctattagatggtaagaacaattaatgcagttttgcacaaatatttttacattctgatcattcagttctgtcattgtaatctttgttgttagaaacaaatgatgaaaacataggggttctgtaaacttttgtaatgctat

SEQ ID NO: 383 - DNA, 1817 bp, Homo sapiens; identical to SEQ ID NO: 173

SEQ ID NO: 384 - DNA, 2545 bp, Homo sapiens; identical to SEQ ID NO: 174

SEQ ID NO: 385 - DNA, 599 bp, Homo sapiens; identical to SEQ ID NO: 176

SEQ ID NO: 386 - DNA, 1882 bp, Homo sapiens; identical to SEQ ID NO: 178

SEQ ID NO: 387 - DNA, 4068 bp, Homo sapiens; identical to SEQ ID NO: 182

SEQ ID NO: 388 - DNA, 2850 bp, Homo sapiens
cgcgagcaggagacggcggcgggcgaaccctgctgggcctccagtcaccctcgtcttgcattttcccgcgtgcgtgtgtgagtgggtgtgtgtgttttcttacaaagggtatttcgcgatcgatcgattgattcgtagttcccccccgcgcgcctttgccctttgtgctgtaatcgagctcccgccatcccaggtgcttctccgttcctctaaacgccagcgtctggacgtgagcgcaggtcgccggtttgtgccttcggtccccgcttcgccccctgccgtcccctccttatcacggtcccgctcgcggcctcgccgccccgctgtctccgccgcccgccatggcgactgcgacccccgtgccgccgcggatgggcagccgcgctggcggccccaccacgccgctgagccccacgcgcctgtcgcggctccaggagaaggaggagctgcgcgagctcaatgaccggctggcggtgtacatcgacaaggtgcgcagcctggagacggagaacagcgcgctgcagctgcaggtgacggagcgcgaggaggtgcgcggccgtgagctcaccggcctcaaggcgctctacgagaccgagctggccgacgcgcgacgcgcgctcgacgacacggcccgcgagcgcgccaagctgcagatcgagctgggcaagtgcaaggcggaacacgaccagctgctcctcaactatgctaagaaggaatctgatcttaatggcgcccagatcaagcttcgagaatatgaagcagcactgaattcgaaagatgcagctcttgctactgcacttggtgacaaaaaaagtttagagggagatttggaggatctgaaggatcagattgcccagttggaagcctccttagctgcagccaaaaaacagttagcagatgaaactttacttaaagtagatttggagaatcgttgtcagagccttactgaggacttggagtttcgcaaaagcatgtatgaagaggagattaacgagaccagaaggaagcatgaaacgcgcttggtagaggtggattctgggcgtcaaattgagtatgagtacaagctggcgcaagcccttcatgagatgagagagcaacatgatgcccaagtgaggctgtataaggaggagctggagcagacttaccatgccaaacttgagaatgccagactgtcatcagagatgaatacttctactgtcaacagtgccagggaagaactgatggaaagccgcatgagaattgagagcctttcatcccagctttctaatctacagaaagagtctagagcatgtttggaaaggattcaagaattagaggacttgcttgctaaagaaaaagacaactctcgtcgcatgctgacagacaaagagagagagatggcggaaataagggatcaaatgcagcaacagctgaatgactatgaacagcttcttgatgtaaagttagccctggacatggaaatcagtgcttacaggaaactcttagaaggcgaagaagagaggttgaagctgtctccaagcccttcttcccgtgtgacagtatcccgagcatcctcaagtcgtagtgtacgtacaactagaggaaagcggaagagggttgatgtggaagaatcagaggcgagtagtagtgttagcatctctcattccgcctcagccactggaaatgtttgcatcgaagaaattgatgttgatgggaaatttatccgcttgaagaacacttctgaacaggatcaaccaatgggaggctgggagatgatcagaaaaattggagacacatcagtcagttataaatatacctcaagatatgtgctgaaggcaggccagactgttacaatttgggctgcaaacgctggtgtcacagccagccccccaactgacctcatctggaagaaccagaactcgtggggcactggcgaagatgtgaaggttatattgaaaaattctcagggagaggaggttgctcaaagaagtacagtctttaaaacaaccatacctgaagaagaggaggaggaggaagaagcagctggagtggttgttgaggaagaacttttccaccagcagggaaccccaagagcatccaatagaagctgtgcaattatgtaaaattttcaactgtcttcctcaaaataaagaagtatggtaatctttacctgtatacagtgcagagccttctcagaagcacagaatatttttatatttcctttatgtgaatttttaagctgcaaatctgatggccttaatttcctttttgacactgaaagttttgtaaaagaaatcatgtccatacactttgttgcaagatgtgaattattgacactgaacttaataactgtgtactgttcggaaggggttcctcaaattttttgactttttttgtatgtgtgttttttctttttttttaagttcttatgaggaggggagggtaaataaaccactgtgcgtcttggtgtaatttgaagattgccccatctagactagcaatctcttcattattctctgctatatataaaacggtgctgtgagggaggggaaaagcatttttcaatatattgaacttttgtactgaatttttttgtaataagcaatcaaggttataattttttttaaaatagaaattttgtaagaaggcaatattaacctaatcaccatgtaagcactctggatgatggattccacaaaacttggttttatggttacttcttctcttagattcttaattcatgaggagggtgggggagggaggtggagggagggaagggtttctctattaaaatgcattcgttgtgttttttaagatagtgtaacttgcttaaatttcttatgtgacattaacaaataaaaaagctctttt

SEQ ID NO: 389 - DNA, 1098 bp, Homo sapiens
atgtcagccccactggatgccgccctccacgcccttcaggaggagcaggccagaccgccctccacgcccttcaggaggagcaggccagactcaagatgaggctgtgggacctgcagcagctgagaaaggagctcggggactcccccaaagacaaggtcccattttcagtgcccaagatccccctggtattccgaggacacacccagcaggacccggaagtgcctaagtctttagtttccaatttgcggatccactgccctctgcttgcgggctctgctctgatcacctttgatgaccccaaagtggctgagcaggtgctgcaacaaaaggagcacacgatcaacatggaggagtgccggctgcgggtgcaggtccagcccttggagctgcccatggtcaccaccatccaggtgatggtgtccagccagttgagtggccggagggtgttggtcactggatttcctgccagcctcaggctgagtgaggaggagctgctggacaagctagagatcttctttggcaagactaggaacggaggtggcgatgtggacgttcgggagctactgccagggagtgtcatgctggggtttgctagggatggagtggctcagcgtctgtgccaaatcggccagttcacagtgccactgggtgggcagcaagtccctctgagagtctctccgtatgtgaatggggagatccagaaggctgagatcaggtcgcagccagttccccgctcggtactggtgctcaacattcctgatatcttggatggcccggagctgcatgacgtcctggagatccacttccagaagcccacccgcgggggcggggaggtagaggccctgacagtcgtaccccaaggacagcagggcctagcagtcttcacctctgagtcaggctaggggcctccccttctcatcctccccacccccccgccaaggttctcacactggcctgggcttgggtgcccatataggaggtctgtatgttcaccaacagtgcggaggggtcacacattgcaaaacactgcccagaacagtaaaaagagcctgcatgccaaaaaaaaaaaaaaaaaaaaaaaaaaaaaaaaaaaaaaaa

SEQ ID NO: 390 - DNA, 860 bp, Homo sapiens; identical to SEQ ID NO: 184

SEQ ID NO: 391 - DNA, 921 bp, Homo sapiens
ccctcggacggccccggaggatgctgctgagccccggcactgcctggctgcgagcacatgatggcgatacgggagctcaaagtgtgccttctcggggacactggggttgggaaatcaagcatcgtgtgtcgatttgtccaggatcactttgaccacaacatcagccctactattggggcatcttttatgaccaaaactgtgccttgtggaaatgaacttcacaagttcctcatctgggacactgctggtcaggaacggtttcattcattggctcccatgtactatcgaggctcagctgcagctgttatcgtgtatgatattaccaagcaggattcattttataccttgaagaaatgggtcaaggagctgaaagaacatggtccagaaaacattgtaatggccatcgctggaaacaagtgcgacctctcagatattagggaggttcccctgaaggatgctaaggaatacgctgaatccataggtgccatcgtggttgagacaagtgcaaaaaatgctattaatatcgaagagctctttcaaggaatcagccgccagatcccacccttggacccccatgaaaatggaaacaatggaacaatcaaagttgagaagccaaccatgcaagccagccgccggtgctgttgacccaagggcgtggtccacggtacttgaagaagccagagcccacatcctgtgcactgctgaaggaccctacgctcggtggcctggcacctcactttgagaagagtgagcacactggctttgcatcctggaaggcctgcagggggcggggcaggaaatgtacctgaaaaggattttagaaaaccctgggaaacccaccacaccaccacaaaatggcctttagtgtatgaaatgcacatggaggggatgtagttgcatttttgctaaaaaaaaaaaaaa

SEQ ID NO: 392 - DNA, 282 bp, Homo sapiens
gagaaatgaagtaataatgaattggcaaatcgaatgtctttgttttatgctgaggcaactccaatgctgaaaaccttgagtgatgccacaacaaaatttgtatcagagaataaaaatttaccaatagaaaataccacagattgtttaagcacaatggctagtgtatgcagagtcatgctggaacaccggtatacaggagcaggtttacaaatggagagacagtgtcattctgcttgagggtaatggtgggtgtcataatactctatgtccacgtacatccag

SEQ ID NO: 393 - DNA, 377 bp, Homo sapiens
agctgttgggaccatcctggcaaccccggtgtttggctgggttctagcgtagccgtctgtgttggccggtgggggacctgcgatcggagtgggaggccagtttgcaccaaggaggtggaaggaggcgggcttttaggctgggaagcgccttagaggagccatttttccaggatgcctggtttgcttttatgtgaaccaacagagctttacaacatcctgaatcaggccacaaaactctccagattaacagaccccaactatctctgtttattggatgtccgtgccaaatgggagtatgacgaaagcaatgtgatcactgcccttcgagtgaagaaggaaaataatggatatctctcccggagtctgtggacctcgag

SEQ ID NO: 394 - DNA, 525 bp, Homo sapiens
gagcaatacctttctgtacccgtggtgagacaagacccagagctactggaaaacaagcactttggaagatttgttttgttttcatggaataataatatgtcagggtataatttaacgtgagtttcttatgtgcccttaaagactgttagacaagaaaagcattcactggctaataatccataggtcgacctatgtcctaagttaggtgtaaggtccgatgccttggccacactcgagctctctttacattgttagttgtcaaccttggctgatggaaatcccgtaaccactatttgttgcactgtgccatgaagggcagcaggcccaagtgctgctctgactgaaaactgagttaacaagatgaaatctaaaggatattcacagtgacttcaattcaggaagaatgcttccaaaagagcccagtggggaaatctgacatcacagaagacattaattcagtcactttcaaagagtttgtctacaggcggtttctctgttatcaaggcatttgaaataggattttac

SEQ ID NO: 395 - DNA, 399 bp, Homo sapiens
agctggaggatggcggtgggggaggctgtctttgtaccactgcagcatcccccacttctccacggaagccccatcccaaagctgctgcctggccccttgctgtaaagtgtgaagggggcggctgagttctcttaggacccagagccagggccctcaacttccatcctgcgggaggccttggcgagacactgccagtgtcttccagagccacacccagggaccacgggaggatcctgacccctgcagggctcaggggtcagcagggacccactgccccatctccctctccccaccaagacagccccagaaggagcagccagctgggatgggaacccaaggctgtccacatctggcttttgtgggactcagaaagggaagcagaactgagggctgggatat

SEQ ID NO: 396 - DNA, 241 bp, Homo sapiens
tgtacctttgcaaacttgtctggattttgactgtatgtgcaaaacagattgtacttagcgattcattaaacatcttttgatcatctgctgtctgccaggcactgtgctaggcatctgaaaaacaaagatggtccctgcagtttaatgtgaagagctatcttaattgtattccacaagtgtattggtcgtatctttgttttggtgtttctacctaaataaattttatattaactaaaaaaaa

SEQ ID NO: 397 - DNA, 355 bp, Homo sapiens
aattcggcaccagggggctccgggtggctgctctgggactgggcacccacaagggctcagtgggcccaaacccttgaaatccgtgaaacagggtggtcccaagagctagaaactcaggaaaccccaggtgctcagggccccgcgtctcgggggctccgtggggcagacccctgctaatatatgcaattctccctcccccagcccttccctgacccctaagttattgcccgctcacctctcccaggccccaggctgcggactggcagggtggcgcctgcggtttctatgtatttatagcaagttctgatgtacatatgtaaaggacttttttaaatatatgtgccttttgcctact

SEQ ID NO: 398 - DNA, 456 bp, Homo sapiens; identical to SEQ ID NO: 7

SEQ ID NO: 399 - DNA, 470 bp, Homo sapiens
tatcaaactaaagatgacatcttaattttgcattgaacattaatgtagcggatataatttgatgattatacttcattagatttaatttctaggccaagatgttactttttaaagtgcagtttaaggttcaggcatgcattctggctcatagtggttgaaagtaatttaaattagtgggaaagtagcatgcttgcatcacatagagtgagattggtattcatttacctatgttgcgccagtttgtgttgcagtttaccaattcaatatagccctgcatttaaagttcctttttaagatttgtggattttatttttattaagaacatagatatataaagtactgtagtttacaggtaggccttgaaatatcttttttaggatctgttaggaataagattgatattgtattgtgtgtaacctgcacaatgtggaaagctgatatacctgtgcaaaatctttgcctctgtgctg

SEQ ID NO: 400 - DNA, 4207 bp, Homo sapiens
ccccggttccgctgtcttttctgtctacagtttgcgatccccgcgtccaggatggagcagctgaacgaactggagctgctgatggagaagagtttttgggaggaggcggagctgccggcggagctatttcagaagaaagtggtagcttcctttccaagaacagttctgagcacaggaatggataaccggtacctggtgttggcagtcaatactgtacagaacaaagagggaaactgtgaaaagcgcctggtcatcactgcttcacagtcactagaaaataaagaactatgcatccttaggaatgactggtgttctgttccagtagagccaggagatatcattcatttggagggagactgcacatctgacacttggataatagataaagattttggatatttgattctgtatccagacatgctgatttctggcaccagcatagccagtagtattcgatgtatgagaagagctgtcctgagtgaaacttttaggagctctgatccagccacacgccaaatgctaattggtacggttctccatgaggtgtttcaaaaagccataaataatagctttgccccagaaaagctacaagaacttgcttttcaaacaattcaagaaataagacatttgaaggaaatgtaccgcttaaatctaagtcaagatgaaataaaacaagaagtagaggactatcttccttcgttttgtaaatgggcaggagatttcatgcataaaaacacttcgactgacttccctcagatgcagctctctctgccaagtgataatagtaaggataattcaacatgtaacattgaagtcgtgaaaccaatggatattgaagaaagcatttggtcccctaggtttggattgaaaggcaaaatagatgttacagttggtgtgaaaatacatcgagggtataaaacaaaatacaagataatgccgctggaacttaaaactggcaaagaatcaaattctattgaacaccgtagtcaggttgttctgtacactctactaagccaagagagaagagctgatccagaggctggcttgcttctctacctcaagactggtcagatgtaccctgtgcctgccaaccatctagataaaagagaattattaaagctaagaaaccagatggcattctcattgtttcaccgtattagcaaatctgctactagacagaagacacagcttgcttctttgccacaaataattgaggaagagaaaacttgtaaatattgttcacaaattggcaattgtgctctttatagcagagcagttgaacaacagatggattgtagttcagtcccaattgtgatgctgcccaaaatagaagaagaaacccagcatctgaagcaaacacacttagaatatttcagcctttggtgtctaatgttaaccctggagtcacaatcgaaggataataaaaagaatcaccaaaatatctggctaatgcctgcttcggaaatggagaagagtggcagttgcattggaaacctgattagaatggaacatgtaaagatagtttgtgatgggcaatatttacataatttccaatgtaaacatggtgccatacctgtcacaaatctaatggcaggtgacagagttattgtaagtggagaagaaaggtcactgtttgctttgtctagaggatatgtgaaggagattaacatgacaacagtaacttgtttattagacagaaacttgtcggtccttccagaatcaactttgttcagattagaccaagaagaaaaaaattgtgatatagataccccattaggaaatctttccaaattgatggaaaacacgtttgtcagcaaaaaacttcgagatttaattattgactttcgtgaacctcagtttatatcctaccttagttctgttcttccacatgatgcaaaggatacagttgcctgcattctaaagggtttgaataagcctcagaggcaagcgatgaaaaaggtacttctttcaaaagactacacactcatcgtgggtatgcctgggacaggaaaaacaactacgatatgtactctcgtaagaattctctacgcctgtggttttagcgttttgttgaccagctatacacactctgctgttgacaatattcttttgaagttagccaagtttaaaataggatttttgcgtttgggtcagattcagaaggttcatccagctatccagcaatttacagagcaagaaatttgcagatcaaagtccattaaatccttagctcttctagaagaactctacaatagtcaacttatagttgcaacaacatgtatgggaataaaccatccaatattttcccgtaaaatttttgatttttgtattgtggatgaagcctctcaaattagccaaccaatttgtctgggccccctttttttttcacggagatttgtgttagtgggggaccatcagcagcttcctcccctggtgctaaaccgtgaagcaagagctcttggcatgagtgaaagcttattcaagaggctggagcagaataagagtgctgttgtacagttaaccgtgcagtacagaatgaacagtaaaattatgtccttaagtaataagctgacctatgagggcaagctggagtgtggatcagacaaagtggccaatgcagtgataaacctacgtcactttaaagatgtgaagctggaactggaattttatgctgactattctgataatccttggttgatgggagtatttgaacccaacaatcctgtttgtttccttaatacagacaaggttccagcgccagaacaagttgaaaaaggtggtgtgagcaatgtaacagaagccaaactcatagttttcctaacctccatttttgttaaggctggatgcagtccctctgatattggtattattgcaccgtacaggcagcaattaaagatcatcaatgatttattggcacgttctattgggatggtcgaagttaatacagtagacaaataccaaggaagggacaaaagtattgtcctagtatcttttgttagaagtaataaggatggaactgttggtgaactcttgaaagattggcgacgtcttaatgttgctataaccagagccaaacataaactgattcttctggggtgtgtgccctcactaaattgctatcctcctttggagaagctgcttaatcatttaaactcagaaaaattaatcattgatcttccatcaagagaacatgaaagtctttgccacatattgggtgactttcaaagagaataaaacactatttcccttgccttttcatactagggcagtatctcctctagctagtgcccatacagaaaattctatcaccatacaaaatttaatgcagtatttatgttttaaagcacaggtgtaccgaaaactgtgaaaagtctgaatttatgggttctatgcatgcatttttgcctaacctagagaaagagtttgataaatttttaccagctttgaagatggattaacttttgactttgagctttaaacttttaagtcagacatttcaggactaatttgattttgtagatatcattgtaagaactttatttgaaagactgaataaagggatttgatttgttttcatcatttaagcacagtcttgtgatgatgagaacataagtgtgattcttttctgtattttgaggtccctaatccaaagcccattttgctaggattttttctgctatcagatgtgttttcactctaaacctagtcttttatgacatgaattgattacttcctgttaattttctatcctcccttactatcctccttttttgttttcagtattcagtatttcagtattctagagtagattttgatataaaagaaaataattcttacatcatcttttgcaacaaattttgttttctgaattgataataaatttaaaaagttgattcctattttcacatatgttcatatgcccctatgtttgggggtatcactcagttttcccttttttgtgtaaagatgttttgtaaaacaaaattgtctcaaagtgattatattatatatataaaaagtaacagattttaacaaaggttaaaagattcttggggtaacagattcttctggggttggaaatcttccatttctcttgagggttttttttaatgagtgttaaatatgttaaaatttttatttctacctcatgtgtttttttaaattattacttgaagttttttatttaataaattttttctactaatgg

SEQ ID NO: 401 - DNA, 335 bp, Homo sapiens; identical to SEQ ID NO: 11
  misc_feature (1)...(335): n=a,t,g or c

SEQ ID NO: 402 - DNA, 277 bp, Homo sapiens
  misc_feature (1)...(277): n=a,t,g or c
tctcttaaaggattaaaagaataggatagtctcataattgtgagtaaacatcaaggcattatattttacaatactgaataaaatttcatctacacacatgttgccattgtttcatttaaggttcagtgcttatagttaactacaatattggacctaacaggatctagattagcaatataaagaagcatagtggtactctgtttcacactttcagtagatttattagangtcaaattctattcaacagacacttnttaggatatacanctaatttaag

SEQ ID NO: 403 - DNA, 351 bp, Homo sapiens
  misc_feature (1)...(351): n=a,t,g or c
tacaaatgcatattatccaactcagtagaaatccatgtaccccagaatgtacagaaggtatgcaatgttccagagtgtcattgtcagctctggctttacatatatattaaatatatatatgttttgagacagggtctcgctgtcacccaggctggagtncagtggccaatctcagctcactgcaacctccgcctcccagcctcaagagatccccccacctcatnctcctgagtagttggactacatgcgcatgccaccacacccagctattatttttatttctttttgtagagacaagggctcactatgttttctcaggctgggtctcgaactcctgggnctcaagtgatt

SEQ ID NO: 404 - DNA, 486 bp, Homo sapiens
  misc_feature (1)...(486): n=a,t,g or c
caatgtgcttgtctaggttcgctattgtgagaatcaagttgatatttacctaacctatatcctccacaaaagcagacagtctggctctgctcttctttcctccatccttagcccacagcacagaaactggcacattgcaggtgctttttgctatgtcagttcctcacctgcttaaagaggtcagggaggacagtcttcctgggcgactcctggcctcaggaactcagatgtgtgagcctcgcccataagaaacaaggtggaggaccctgtagggcaggaaaatcatgttaacagctttggcgtggggcactccccagggataggcacaggagctgtgcaggncaagtagaaaagagcactgggagaacggcccagtttcacagaagaggaggcagcaagtctgccacatttttgttattattgctggaaatttgtttcattcacttcgacagtttcaggaattaaatattagggnagatttttttt

SEQ ID NO: 405 - DNA, 6383 bp, Homo sapiens
cgcggccgctatatataatgcagcatcacaccatgtagggcatttactcttattttatacattcagatatgtttgaaacattcttaaggctacaaaacagaacatagaaaaataaacaggaatatattcaacacttacaaaaagtgatatgataaagaatataaagtactagtttccttttaacacttcaaaagatatgtatatatacttttttttacaagtaacatcacaaatgctcacatcttcacatgctcttaaagtattatttgtactcagtgtaaggctattatcgtttttcatacataaaattttctagctctgtaacacaatgcaatttttaatccattcaagtaagttcaaccccaaagttgccgcttcccagcattaagacatgcacccacccctcttctaagattttctaaacttgtatttcggggagaaagacctcttttaaaaaataatccaattagtgggagagtaaatggctgacattagtagcaaaaccttagttatctgaaaataacatattggaaatgagacattattaggattttaaacaaacaatagcatttagacataaagtaggaagcaaaatacagtaaacagaaatagtgtagccaaatatcattctcttcagctaccttaagtaaaagacaaaacatttacctcatctaaaaatgaaggtaaaacgaaagaggcaaaaataaatattgctagtttctaggatggctgaatgttttctaaaccagaaatggttagaaaggaactttattgcaccaagtcaatcataagcaagtttgcagttcacaggcattttaattcaaccttgagtcacaaaggagaacaacacgctgcgagaatacagtctacagtctgcattaaataagaatatatcagcattgtggtctgggaaaacctatgcttgccaggacaaggcagggtgctgagcttaggtcatgccatgaaaatgaatttgtgggttatcagtaaacagtatgaggactacacagatgccagcatcctgctgccaaggagacatggggcaagagttgaagatttgagaggaaatgaagagacatacacaacaccaaaggaaaagggggctggaatcaagttcagccaaagcacctaacacaaaaaacaggtgagctttggtcagtctgttcttcaaaatatgtatgatcatatggtaatgaagtttcataatttccaactcaaaaatacaaatgatcctcagttctatacttttgcctctattctcttataaagaaatatgtcaacataacagtatgacataacagttaaaataaggacaaaagcttgcttatcttagtttgacctcagcataaggcaaaatcccctggagaatacatttaaaaacaaacttaaaaggaaaaaaagcgaaaccaacttcatgcaaagattccttttaaaactatcaaaagtcagttcttttattccagaggtcactgagaaaagtaccatctgctaaaattctctttcaagcacttcttccatcatatcctagaggtgagatatgggaaacagaaagcaaatcagtgttcctcaggagctatatctgttactcaattgagggtaagacaaagtgacaatgaagatatgagtagtatttccttccaatttttaaagattttcagaagctgagatcaaaccccactcaataaaatgcaggagactagaagcaacaacttattttggactcctgagatcaaacacattgaactttcaaatctgggtgtttctatcaaaatgtgattttcattaaaatcagtaagctagtcctacataaaaaagcatgagctgaaagtggaggaccctctatcttctcattccttaactgagccaccgatgttaagaaaaaaatggcttaagcggtaccttcaacaactattctagttaagaaggtgacaacaaattgaggccgcgaattcggcgaaaactctttcctttggttgtgctaagaggtgatgcccaaggtgcaccacctttcaagaactggatcatgaacaactttatcctcctggaagaacagctcatcaagaaatcccaacaaaagagaagaacttctccctcgaactttaaagtccgcttctttgtgttaaccaaagccagcctggcatactttgaagatcgtcatgggaagaagcgcacgctgaaggggtccattgagctctcccgaatcaaatgtgttgagattgtgaaaagtgacatcagcatcccatgccactataaatacccgtttcaggtggtgcatgacaactacctcctatatgtgtttgctccagatcgtgagagccggcagcgctgggtgctggcccttaaagaagaaacgaggaataataacagtttggtgcctaaatatcatcctaatttctggatggatgggaagtggaggtgctgttctcagctggagaagcttgcaacaggctgtgcccaatatgatccaaccaagaatgcttcaaagaagcctcttcctcctactcctgaagacaacaggcgaccactttgggaacctgaagaaactgtggtcattgccttatatgactaccaaaccaatgatcctcaggaactcgcactgcggcgcaacgaagagtactgcctgctggacagttctgagattcactggtggagagtccaggacaggaatgggcatgaaggatatgtaccaagcagttatctggtggaaaaatctccaaataatctggaaacctatgagtggtacaataagagtatcagccgagacaaagctgaaaaacttcttttggacacaggcaaagaaggagccttcatggtaagggattccaggactgcaggaacatacaccgtgtctgttttcaccaaggctgttgtaagtgagaacaatccctgtataaagcattatcacatcaaggaaacaaatgacaatcctaagcgatactatgtggctgaaaagtatgtgttcgattccatccctcttctcatcaactatcaccaacataatggaggaggcctggtgactcgactccggtatccagtttgttttgggaggcagaaagccccagttacagcagggctgagatacgggaaatgggtgatcgacccctcagagctcacttttgtgcaagagattggcagtgggcaatttgggttggtgcatctgggctactggctcaacaaggacaaggtggctatcaaaaccattcgggaaggggctatgtcagaagaggacttcatagaggaggctgaagtaatgatgaaactctctcatcccaaactggtgcagctgtatggggtgtgcctggagcaggcccccatctgcctggtgtttgagttcatggagcacggctgcctgtcagattatctacgcacccagcggggactttttgctgcagagaccctgctgggcatgtgtctggatgtgtgtgagggcatggcctacctggaagaggcatgtgtcatccacagagacttggctgccagaaattgtttggtgggagaaaaccaagtcatcaaggtgtctgactttgggatgacaaggttcgttctggatgatcagtacaccagttccacaggcaccaaattcccggtgaagtgggcatccccagaggttttctctttcagtcgctatagcagcaagtccgatgtgtggtcatttggtgtgctgatgtgggaagttttcagtgaaggcaaaatcccgtatgaaaaccgaagcaactcagaggtggtggaagacatcagtaccggatttcggttgtacaagccccggctggcctccacacacgtctaccagattatgaatcactgctggaaagagagaccagaagatcggccagccttctccagactgctgcgtcaactggctgaaattgcagaatcaggactttagtagagactgagtaccaggccacgggctcagatcctgaatggaggaaggatatgtcctcattccatagagcattagaagctgccaccagcccaggaccctccagaggcagcctggcctgtactcagtccctgagtcaccatggaagcagcatcctgaccacagctggcagtcaagccacagctggagggtcagccaccaagctgggagctgagccagaacaggagtgatgtctctgcccttcctctagcctcttgtcacatgtggtgcacaaacctcaacctgacagctttcagacagcattcttgcacttcttagcaacagagagagacatgacgtaagacccagattgctatttttattgttatttttcaacagtgaatctaaagtttatggttccagggactttttatttgacccaacaacacagtatcccaggatatggaggcaaggggaacaagagcatgagtgtttttccaagaaactggtgagttaagtaagattagagtgagtgtgctctgttgctgtgatgctgtcagccacagcttcctgccgtagagaatgatagagcagctgctcacacaggaggccggatatctgataagcagctttatgaggttttacagagtatgctgctacctctctccttgaagggagcatggcagacccattggatggattggggtgaacagttcaggtcccatgcttggagcattgggtatctgatgtctgcaccagaacaagagaacctctgacggtggagaaccatgtggtgtaagaagagatcttaggtctcttctttataccaagctcatgttttataccaagctcatcttttataccaagctgtgcaggtgactatgcctcctcttctgcacagaatgcttccaccagcatcctgagaagaaatgattacttctgtaaaacatccttttttccagcctctgggaatcagcccccccctctctgcactatccgatcctcatcaacagagggcagcattgtgttggtcagtgttcccttggcgagcaattgaaacttgtttaggccctagggttgagcaattttaaggttgagactccaagtctcctaaaattctaggagagaaataaagagtctgtttttgctcaaaccatcaggatggaaacagtcaggcactgactggggtgcttccaagaggcatgagagtgcctactctggcttgagcacttctatatgcaaggtgaatatgtactgagctaggagacttccctgcaaaatctctgttcaccctgggttcacatccccatgaggtaatattattattcccattttacaaataatgtaactgaggctttaaaaagccaagacatctgcccaaagtgatggaactagaaagtctagagctggtattctagcccaaatctgtctgaccgcaatacacagattatttattcctattagacactggcttctactgaaaatgaaacttattgcagagggaataaatacaaagatggaaagccagtaaagaagtcagtatagaaccactagcgatagtgttgctctggcacagaccactgtggttgatgcatggccctccaacttggaataggattttccttttcctattctgtatccttaccttggtcatgttaatgactttggagttattcagttcctgaccctttaattctcacaaccaaccagtcatgttgcttgaagccattatagacgagcttcaaagcaactttaaaagattgttatgtagaagtatgagttcttcctttaattatcattccaactttcagctgtagtcttcttgaacacttatgaggagggaggacattccctgatataagagaggatggtgttgcaattggctctttctaaatcatgtgacgttttgactggcttgagattcagatgcataatttttaattattgtgaagtggagagcctcaagataaaactctgtcattacgaagatgattttactcagcttatccaaaattatctctgtttactttttagaattttgtacattatcttttgggatccttaattagagatgatttctggaacattcagtctagaaagaaaacattggaattgactgatctctgtggtttggtttagaaaattcccctgtgcatggtattacctttttcaagctcagattcatctaatcctcaactgtacatgtgtacattcttcacctcctggtgccctatcccgcaaaatgggcttcctgcctgggtttttctcttctcacattttttaaatggtcccctgtgtttgtagagaactcccttatacagagttttggttctagttttatttcgtagattttgcattttgtaccttttgagactatgtatttatatttggatcagatgcatatttattaatgtacagtcactgctagtgttcaaaataaaaatgttacaaatacctgttatcctttgtagagcacacagagttaaaagttgaatatagcaatattaaagctgcattttaa

SEQ ID NO: 406 - DNA, 284 bp, Homo sapiens
cacgaggtcataatctagtatgcatagattgtaaacttttagaaattagaaacttgaaaacctacacttttgctttggtgattttacaggtttgtacaaacataattgagaaaaatgcaaacccagagtggaatcaggtcgtcaatcttcagatcaagtttccttcagtgtgtgaaaaaataaaactaacaatatatgactggtgagttgaaaatacgtatgtgtctaattcaacataaaataaacattggatattgtgaaacattaaaaaaaaaaaaaaaaaa

SEQ ID NO: 407 - DNA, 244 bp, Homo sapiens
cacaatgtggttaacatggattaatgtgggaatttggcttcaagaacacaaccttaggaccttgggcccaaaagctggtggtgaaatgagaggagccaatttaagaagacccttatggagacctgaggctgcagaaactggtaggtttcatcaggtggttaaagtcgtcaaagttgtaagtgactaaccaagattatttcattttaaaaccacagaataaaaatgacaccttgagcttctctta

SEQ ID NO: 408 - DNA, 382 bp, Homo sapiens; identical to SEQ ID NO: 196
  misc_feature (1)...(382): n=a,t,g or c

SEQ ID NO: 409 - DNA, 1086 bp, Homo sapiens
cggggcggcggcggcggcgtgaagtcactgctgctctgggttcgggttggcgactgaaggcggtaccggcctcccggaacagcccgggggagggcttaggtgcagaagggcaggctggccgcggccggtttggtctggggaccacgggctggagcaggtggaaatttaaaattgtttacagtcaacactgtttccagccatgggtttgtctccatctgctcctgctgttgcagttcaggcctcaaatgcttcagcgtccccaccttcaggatgcccgatgcatgaagggaaaatgaaaggctgtccagtgaatacagagccatctggcccaacctgtgagaagaaaacatactctgtgcctgcccaccaggaacgcgcctatgagtacgtggagtgtcccattaggggcactgcggctgagaataaggagaacctagatccttcaaatctgatgccaccaccaaatcaaacaccagctccagatcagccatttgcattgtctactgtcagagaagagtcatccattccgagagcagattcagagaaaaagtgggtttacccttctgagcagatgttctggaatgcaatgttaaagaaagggtggaagtggaaggatgaggatatcagtcagaaggatatgtataatatcattagaattcacaatcagaataacgagcaggcttggaaggagattttgaagtgggaagcccttcatgctgcagagtgtccttgtggtccatcattgatccggtttggagggaaagcaaaagagtattcaccaagggcacgaattcgttcctggatggggtatgagttgccttttgataggcacgattggatcataaaccgttgcgggacagaagttagatatgtgattgattattatgatggtggtgaagtcaacaaggactaccagttcaccatcctggacgtccgtcctgccttagattcactttcggcagtatgggacagaatgaaagtcgcttggtggcgttggacctcgtaaagcactgtttcagatggaaaaatataaactatttttttctgagcgatacattaaactattttccccagaaaaaaaaaaaa

SEQ ID NO: 410 - DNA, 2149 bp, Homo sapiens
  misc_feature (1)...(2149): n=a,t,g or c
gacatggccaacatcgcggtgcagcgaatcaagcgggagttcaaggaggtgctgaagagcgaggagacgagcaaaaatcaaattaaagtagatcttgtagatgagaattttacagaattaagaggagaaatagcaggacctccagacacaccatatgaaggaggaagataccaactagagataaaaataccagaaacatacccatttaatccccctaaggtccggtttatcactaaaatatggcatcctaatattagttccgtcacaggggctatttgtttggatatcctgaaagatcaatgggcagctgcaatgactctccgcacggtattattgtcattgcaagcactattggcagctgcagagccagatgatccacaggatgctgtagtagcaaatcagtacaaacaaaatcccgaaatgttcaaacagacagctcgactttgggcacatgtgtatgctggagcaccagtttctagtccagaatacaccaaaaaaatagaaaacctatgtgctatgggctttgataggaatgcagtaatagtggccttgtcttcaaaatcatgggatgtagagactgcaacagaattgcttctgagtaactgaggcatagagagctgctgatatagtcaagcttgcctcttcttgaggagcaccaacatctgttatttttaggattctgcatagatttcttttaatctggcattctcgcctaatgatgttatctaggcaccattggagactgaaaaaaaaaaatccctgctctgtaaataaagctaattaaacgtctgtgtaaatttaaaaaggggaaatactttaattttttttcttaatagtgtaaaaattccctgagctaagctaaaaccatggaagaaacatgctactttagtgtttagcagtgtaccaagactagcaagagtttgcttcaggatttggttgaataattaagataatatttggagtgtgtcagggccattcaaattgttggtgttgcatcacagctaccttaactgtttttaacatggatcctctgtgcctgtgaatttacttgcatgcttgtacttgacttcttaggatgggtagctgaaaagaccaccattttaagcatttgagaattcttaaatatgaaatttattcagaattgaagatggtgacctattcagagcctttttgtccttgtcaacagactgggacagtgtctgattcccccttcacccccccccacccccgccttggcacacacagctaatattctaatggtaaatttctctgtatcaggtggggaaatgtgctgaaggacagtatgtatcccttgcttcatttttaggtcgtaggtttggaatgtcttgtcccagttcttcaaacactcttaaatttttcttaagtaatgtaaaaatggaactgccaattttatttctcttgcaaaaatagtaaatacttgatgttacattattcccaggtttaatgaaagaacccaacttagtttttcagtgaatttgacacctattttttagtgatgaaatttttctttgagaactggcaaggatgcagtcagctgtttgcagtttttagcctgattttggggtctatagagattgctttattggatacttcaagtcattcttgcttgcacttcccctattgacacatgaaagctgtgttggtgttttattgtacatacttcagatgcacataggaatagaagtgtgttataaatctagctttctttatgatgtttctgataatacgagaattgaaaactttaccttctcttgtacatagtcagactatttgtattaaatttacatttcattctaagttccaaaagtttgaaaattattagttttgcaagatcacacactaatgtaaccattttatgaaggttgaagtggatttatgcaggcagttctatatatagaaatncaattctttttaaatttttaggaccaatacaaaataacacaaatgtaatggaatcagactgaattaaagtaaggctgtatattgaaagtcatattataaaaggtttgctttctttaagtgttatttatcttaaattataatcgttaaatgtttggaagataatttttgaatcataacgtcagcataacttcatttgacttctcaataatcttgtcgacgcggccgc

SEQ ID NO: 411 - DNA, 495 bp, Homo sapiens
agactggacctactgattcaacttggagatgagcgggtctgtcctcttcacggcgggagagaggtggagatgctttctgaccccgtcgaggtcatccctgtactgggccttacataatttctgctgtcggaaaaaatccactacacctaagaaaattactcccaatgttactttttgtgatgaaaatgcaaaggagcccgaaaatgcacttgacaagctcttctcttcagaacagcaggcttccatcttgcatgtgttgaatacagcatctactaaagaacttgaagctttccgattgcttcgtggaagaaggtccatcaatatccgtagagcacagagaaaactttgggccatttcagaatttaagagagtttaatgaatgtgcccttgtttaagtataaaagtacagttcaagtttgtaactccatactttgtccaaagactggacggggaaaaaagaaagtcaccggaaaaccggttcctgagaaagctcct

SEQ ID NO: 412 - DNA, 575 bp, Homo sapiens
  misc_feature (1)...(575): n=a,t,g or c
cccccagctctcagggataagaccagtcccccagcgtggtggtcagcacggaagctccaccttctgggtgaggcgccatcctaaccatccagccaggccacccacaacccgagaatcagggagaaagtccctccccagcagccccctcctcctggctgggaagaatggtcccccagcaagcacttgcctgttcattcccgttcatgttttgcttctctctcagactgccttcctgcttctgggctaacctgttccaagccaggctcctcaatgtgacctcgcagttgagaagcccattatcgtggggcatccttttgcctacagcccctggttagggcactttggacaggtcttgctattcagtgaacctttgtacatttcaaagaagactccatggctgctccagatgcccccttgctgggtgcaggtggggactgtccaatgcagagtggcgggacagagagttaaagcaattcctgggtctccttcttatgactgtctatggggtgaattgccttctggggttgtctcgatctgtgnttcaataaatgccgctgnaatgcaaaaaaaaaaaa

SEQ ID NO: 413 - DNA, 345 bp, Homo sapiens
  misc_feature (1)...(345): n=a,t,g or c
cctcagtccgatggtgaatggctattcgtaaatggctggtctggctctttggtgttggagcctttccaatagccccatgaaaagaagcatcacccaaggatattgtaaaaaggatgtaacaaggagatagggtagacattgtactcagtgggccttggggctgagccnagctctgagcagaggactgtggcattcactgtccttgagtgtttcaccttcttggataacacacgggccttctcttctggatttcatcagagattacagccagatgggggctgaagaccatcctcttgaccacagaggtgtgactgtnggaattcctcccaatttatgggtttccca

SEQ ID NO: 414 - DNA, 2584 bp, Homo sapiens
gaggagcagcgagtcaagatgagagttcagccgcggcggcagcagcagcagactcaagaatgaacaatccgtcagaaaccagtaaaccatctatggagagtggagatggcaacacaggcacacaaaccaatggtctggactttcagaagcagcctgtgcctgtaggaggagcaatctcaacagcccaggcgcaggctttccttggacatctccatcaggtccaactcgctggaacaagtttacaggctgctgctcagtctttaaatgtacagtctaaatctaatgaagaatcgggggattcgcagcagccaagccagccttcccagcagccttcagtgcaggcagccattccccagacccagcttatgctagctggaggacagataactgggcttactttgacgcctgcccagcaacagttactactccagcaggcacaggcacaggcacagctgctggctgctgcagtgcagcagcactccgccagccagcagcacagtgctgctggagccaccatctccgcctctgctgccacgcccatgacgcagatccccctgtctcagcccatacagatcgcacaggatcttcaacaactgcaacagcttcaacagcagaatctcaacctgcaacagtttgtgttggtgcatccaaccaccaatttgcagccagcgcagtttatcatctcacagacgccccagggccagcagggtctcctgcaagcgcaaaatcttcaaacgcaactacctcagcaaagccaagccaacctcctacagtcgcagccaagcatcaccctcacctcccagccagcaaccccaacacgcacaatagcagcaaccccaattcagacacttccacagagccagtcaacaccaaagcgaattgatactcccagcttggaggagcccagtgaccttgaggagcttgagcagtttgccaagaccttcaaacaaagacgaatcaaacttggattcactcagggtgatgttgggctcgctatggggaaactatatggaaatgacttcagccaaactaccatctctcgatttgaagccttgaacctcagctttaagaacatgtgcaagttgaagccacttttagagaagtggctaaatgatgcagagaacctctcatctgattcgtccctctccagcccaagtgccctgaattctccaggaattgagggcttgagccgtaggaggaagaaacgcaccagcatagagaccaacatccgtgtggccttagagaagagtttcttggagaatcaaaagcctacctcggaagagatcactatgattgctgatcagctcaatatggaaaaagaggtgattcgtgtttggttctgtaaccgccgccagaaagaaaaaagaatcaacccaccaagcagtggtgggaccagcagctcacctattaaagcaattttccccagcccaacttcactggtggcgaccacaccaagccttgtgactagcagtgcagcaactaccctcacagtcagccctgtcctccctctgaccagtgctgctgtgacgaatctttcagttacaggcacttcagacaccacctccaacaacacagcaaccgtgatttccacagcgcctccagcttcctcagcagtcacgtccccctctctgagtccctccccttctgcctcagcctccacctccgaggcatccagtgccagtgagaccagcacaacacagaccacctccactcctttgtcctcccctcttgggaccagccaggtgatggtgacagcatcaggtttgcaaacagcagcagctgctgcccttcaaggagctgcacagttgccagcaaatgccagtcttgctgccatggcagctgctgcaggactaaacccaagcctgatggcaccctcacagtttgcggctggaggtgccttactcagtctgaatccagggaccctgagcggtgctctcagcccagctctaatgagcaacagtacactggcaactattcaagctcttgcttctggtggctctcttccaataacatcacttgatgcaactgggaacctggtatttgccaatgcgggaggagcccccaacatcgtgactgcccctctgttcctgaaccctcagaacctctctctgctcaccagcaaccctgttagcttggtctctgccgccgcagcatctgcagggaactctgcacctgtagccagccttcacgccacctccacctctgctgagtccatccagaactctctcttcacagtggcctctgccagcggggctgcgtccaccaccaccaccgcctccaaggcacagtgagctgggcagagctgggctgccagaagcctttttcactctgcagtgtgattggactgccagccaggttaataaactgaaaaatgtgattggcttcctctcgccgtgttgtgagggcaaaggagagaagggagaaaaaaaaaaaaaaaaccacacacacccatacacaatataccagaaaaggaaggaaggatggagacggaacatttgcctaatttgtaataaaacactgtcttttcagggttgcttcatgggttggaggactttctaaccaaaaattaaaaaaaaaaaaaaaa

SEQ ID NO: 415 - DNA, 275 bp, Homo sapiens; identical to SEQ ID NO: 199

SEQ ID NO: 416 - DNA, 318 bp, Homo sapiens
tttattattttgaatgatttaatggttttctacacaatttacatcacaacatgtaaattttagcagtaacatctgattctaacagcacatcatgctattcctttcatagagccttcagagattcaatgctaaacaaatttccttagttggcatcaaggcactgatcactttagaggcttttaagaaattatttaaagatgcaaatgcctctgagtgaagtgtactatcccatcactgaagcccacaggaacaagtcctacaattttaaaaaggctcgatggaaaaatttctcaatcctgaaatcccctagggaagggg

SEQ ID NO: 417 - DNA, 1297 bp, Homo sapiens
cctaagtcgccgcagaactgccacgtggggatgagatttgctgggctggtagcggcggctgctgcggggaggtcccgcccacgtgaagccagcctaactgagctctggactttggggacagctgtcagtggcctaggccgcaggacaccatgaagcaactgccagtcttggaacctggagacaagcccaggaaagcaacatggtacaccttgactgtccctggagacagcccctgtgctcgagttggccacagctgttcatatttacccccagttggtaatgccaagagagggaaggtcttcattgttgggggagcaaatccaaacagaagcttctcagacgtgcacaccatggatctgggaaaacaccagtgggacttagatacctgcaagggcctcttgccccggtatgaacatgctagcttcattccctcctgcacacctgaccgtatttgggtatttggaggtgccaaccaatcaggaaatcgaaattgtctacaagtcctgaatcctgaaaccaggacgtggaccacgccagaagtgaccagccccccaccatccccaagaacattccacacatcatcggcagccattggaaaccagctatatgtctttgggggtggagagagaggtgcccagcccgtgcaggacacgaagctgcatgtgtttgacgcaaacactctgacctggtcacagccagagacacttggaaatcctccatctccccggcatggtcatgtgatggtggcagcagggacaaagctcttcatccacggaggcttggcgggggacagattctatgatgacctccactgcattgatataagtgacatgaaatggcagaagctaaatcccactggggctgctccagcaggctgtgctgcccactcagctgtggccatgggaaaacatgtgtacatctttggtggaatgactcctgcaggagcactggacacaatgtaccagtatcacacagaagagcagcattggaccttgcttaaatttgatactcttctaccccctggacgattggaccattccatgtgtatcattccatggccagtgacgtgtgcttctgagaaagaagattccaactctctcactctgaaccatgaagctgagaaagaggattcagttgacaaagtaatgagccacagtggtgactcacatgaggaaagccagactgctacactgctctgtttggtgtttggtgggatgaatacagaaggggaaatctatgacgattgtattgtgactgtagtggactaataaaacccacatttttattaaaaaaaaaa

SEQ ID NO: 418 - DNA, 469 bp, Homo sapiens; identical to SEQ ID NO: 202
  misc_feature (1)...(469): n=a,t,g or c

SEQ ID NO: 419 - DNA, 422 bp, Homo sapiens; identical to SEQ ID NO: 206

SEQ ID NO: 420 - DNA, 388 bp, Homo sapiens; identical to SEQ ID NO: 23
  misc_feature (1)...(388): n=a,t,g or c

SEQ ID NO: 421 - DNA, 421 bp, Homo sapiens; identical to SEQ ID NO: 208
  misc_feature (1)...(421): n=a,t,g or c

SEQ ID NO: 422 - DNA, 455 bp, Homo sapiens
  misc_feature (1)...(455): n=a,t,g or c
gctttcaggaaaggtttattgtggtgagtgccttctgtacagtcaactgcaaatgaaacgcagaggatgggtgcccagaagcactgcggcagaggcgcacgggaagcccggggccaggctcatgcaacacgacgctcaccgcggctcgggcctggggcgtcagagaaacctttttaaaaaatggagatgaatgttacagaattggacaacccgaactgcttttcaaaaccagaggaaggaggttcttaagccgttactcagataccagtgctggggagggaggcctgacttcagcaacagctgtgggtgggctggaggcggcgcantttggggncccccacgccagctgtctcagccaccaccttgtgcggcgctttgctccgagggggtcagcaagagcaactgattggctgccactttccaggccccgagagacagggcctcacgtaacttta

SEQ ID NO: 423 - DNA, 415 bp, Homo sapiens; identical to SEQ ID NO: 24

SEQ ID NO: 424 - DNA, 421 bp, Homo sapiens
  misc_feature (1)...(421): n=a,t,g or c
aatgtttcactctttatatataattgaatacttagttattgtgacaaaaagttagtatggctaaagaaaataatgcaagtacatcacctgaaataacncctgtatcccacgatacatgaatccaattccaatgctgttttctttctatttcagcaacactatacgtagtttaatagtcaagataccacttgaatactatccaagaataatcagatctgctcaagttaggtttatataatttaccaaggtgatagattctgactttgaagattactgaccactgatcactaagaactaatattagctgaccatatgatnccncaagaactaactttgactgataaatttgaatttcatcttttgtacactgaggaaagagattaacaattttctccacatcaagatggcttgtnttgaagga

SEQ ID NO: 425 - DNA, 441 bp, Homo sapiens
  misc_feature (1)...(441): n=a,t,g or c
tgacgtgttacctgctatttttattccccatttgccatcttctgattgggggttgatgttttacagatttttttttcaaaggctttatttcagtttctgaggttaggatgcccctgtgcccctcgctccacacctgggcaggtctaaacttccttccaggatggcctccacacacagcctcccacctggggtcacctggcttcctgggggacccgcaanganggggcagggagcagcagtccgggtgcggggatcgggggacctcggcgggggcatccacaggggctgcaagacctctggtcagcatggcgtgggtggggagagcgtttctccctggggtcctgagccagtgactcctgttaggacctttgtcccacctccgcctggtggaccggcaggacctggtctagccagtcctgcagcctccattcccccacctgc

SEQ ID NO: 426 - DNA, 561 bp, Homo sapiens
  misc_feature (1)...(561): n=a,t,g or c
aatcagcagcaagcagaatgttaattaatagtctaagatgatctgagagttaattaatagactaagattatctgtggtctatttattgaccacaccttataaacaggataggtttttcctattttgagactttacatgtctcagtactttctaaattgaaatcagagcattaaatcaagggaattgatgtggacaaaacagctgccagcatgatagtgtttgtgaattatgtacctctcttagacataaactcttagacataaactcataaaatctgttcagaacactgaacagatttagatttaccatagccaataaaatttggatttagtgggttagtctcagcatttcatggaatcctgagatgcccaaatctctggaaacttcctatttcctgttttactatctttttccttttatcaaaatgggtgccatgagggtcccagaccaaaactcaccatcctggaaaaacaaaagtctggggagagaactccnggttttatttcagatgatatatttgccaatcnttggaataggtcnggtcataattataataggatt

SEQ ID NO: 427 - DNA, 447 bp, Homo sapiens
  misc_feature (1)...(447): n=a,t,g or c
ttttttttttttttttgctgagaccggtaatattctttgtttatagtagtaatatcatttggaatagcgtgtttaagagtaataaatacagtctcttggacacgggactcacttatcagttcatactacaataaaatcattttggaaaatatactactaataatatatttcaccaaaaaacaatattacaattttctttaaaattataccaattatgactcatacaatagcaacacctagaaaacattttgtctgacgtcataaaatgagtgcagatataaaagaatcaacagcagataatgcacctaattcatggattaaagacaaagattaaaaaggaaagaagagtttgtcattttacatatcagnggaaatataataagttaagtctacaataatctgggttgaatgcatcacacttacacattgaaaatttatcagactgac

SEQ ID NO: 428 - DNA, 429 bp, Homo sapiens
tgaaaagatgaaagctgaaaaaagttaggtttggtgtaggttacaccaatggatgttggtgcctcctactggtcctaacaaaaatataagtggtaccagcaggcactacttcgcataccaatgtgaagtaaaaattccctttcatctgtggtcaagtatggaaaaattatgaaggtcctcattaaatccacattttttaacccattaaattatccttataaaaattcagataaactactgtcataaatgcaactgcactgcctcaaggacctaaaaactgttttcctaatcaactagatggcataatcaggtaacagcagaaacagatagtctagtgaatttccgagagtcaaaatatgctactttgatgcttattaaacactgaaaactttcacaatactaactccagttaagttgggtgaggttaaa

SEQ ID NO: 429 - DNA, 446 bp, Homo sapiens; identical to SEQ ID NO: 33

SEQ ID NO: 430 - DNA, 614 bp, Homo sapiens
  misc_feature (1)...(614): n=a,t,g or c
agttgaattagctaaacgaatccttgtatttatttttcacacagcacaaatgcaggtagtacacagtaagttcataattccccacaaaacttataaacttaacaaatgggaatctaaacataatattctgaatcacccatagctatccactgtgtggaatccattctacagcagcagaggagtaccttaatttaaagcaccaagtttccaggcattactacaaatatcttcttttcattctctaatacatgcagtcaaactgcctatgaagcaaataccaattcatcttacgctttaacagataaggtaaagcacttgggaaatcaacattattcttaagtctgaaagtgattctacctctttacctattatattttctcccatgaaattttaaacttttaatggagttatatttaatatgagaataaattaaaatttgaacttaatgtctttcagattctccagcgtttagaatgttatatttgttttatgtctgagggaacaaaacgtaatttcnaatttagatattctggctaccttattaaaggtacattataatttatagcaaggaatatcatcggttggccaacatacggatttaaaaatncccaatg

SEQ ID NO: 431 - DNA, 154 bp, Homo sapiens
tgtacatctttattatttctaaagcactttcctcaacctaatttcagtttttacaattggtactcaagaaaatagagacagaaatcatttgattttgcccagaaaccatctgcttatatttataaggccacctaatttgaaatcacatatagac

SEQ ID NO: 432 - DNA, 315 bp, Homo sapiens; identical to SEQ ID NO: 217

SEQ ID NO: 433 - DNA, 433 bp, Homo sapiens
atctatgactacaggaaaacatttatttacatgccctctacaaaatggatttacaaaacatagtaactattagggtacatgaccttgctcctatcttccccattgtgcttcttctctatagaaaatccaatatgaaatgacaaagagtactgtactcagaataagaacttcatctatcataaatgtacacataaatatcagtgaattgtcatactcaagactcagattcaggaacttcttcatcagggcagcagtaatattccacaaaacatatttgtccatcttcatttctaatcatatactgtaatgaaaggaagcctctgttatctgtccgaatagataccttacaagataggactaatgcctttgtagagggtttcagtaagggaatcttgtatctgttgacttgggtctgattacaatgaaatgcttc

SEQ ID NO: 434 - DNA, 182 bp, Homo sapiens
tatgagtggacggcagacagctatatttagtggtgcctcgacactcacgaaccgccagcgtggcgcctggatcttgcccagctgccagctccccccaccaggactgtggttcctcagtttctcctgccagccccggctcatctcagggcaaagctatagacatggtagatctcatcggggag

SEQ ID NO: 435 - DNA, 476 bp, Homo sapiens
caaacctcctcctttcaaatcaggaagtatacataaagtgcaagtaaggttcattccctcgctgtgctcctaggctcttctcttgatagtattaccgaatctatcaggtaaaccgctggccgagtaggatgtctgcaggaatttctggagttagcaaataacttcatctggcaaagagagtatctgaagatcaacacagtcttggcaagaaaacatgaagtaccacacacaagacagggatgtgaaggatgcaagaagtagcagggagattgttgtcactgaagaggccatctttggatctcaaagaatttaagagaattcaggaaccgttactaaaatgaacaaggccagcagatttcagagcacggtcagtcttcagtgagggcagattcagttttcctagttaaattcctgaatttctttttggcttctgccctttcttcagcatcaaagtaccagacagtcatagcatatct

SEQ ID NO: 436 - DNA, 379 bp, Homo sapiens
aaccaccaccaccacagccatttattaagtgcttgccaggcactgtgctaaagctttacaaacattgtttcagttattccaacaaccctgaggtagatattttcaacatgcctccctccacccatgttattatagttgaggaaactgaggctcagagaggttaagtaaatcaaccaaggtcaaacccagctggtaagtagtgaagctagaaattcaaaccaactatatgtgactccaaaatccatgcctttaaacactatcctagattgtttaccattgaaagttaaaggacatatgctccttcccaaaatatgagaatagattttcagtgggaaagcaggggggagccatatgtaaattctttcatcagctatgggac

SEQ ID NO: 437 - DNA, 403 bp, Homo sapiens
tttttagtttggttttgattttaaacattttattattgaaatttcaaacacatacaaaagtagaaatattagaacaataagtctccatgaacaaaacactccacttaaattatcaacatgttgccaatttagtttccagctctctttgccaattatttttcttttgctagaatattttaatccaaatgtgtctatcttcatttcatagtatgtatctcatatcatacgatcttttattttttataatcacactgacataatccctaaccaaattaatatatgtaaatatcatttaatatttagtccatgtccacacttccctcactgtctccaaaatggctttttatgttttgttcaaaccaggtccaagtaatgccaacatactgaatttagttgatatgtc

SEQ ID NO: 438 - DNA, 522 bp, Homo sapiens
cagtcctagagcctgcagtattgtaattttttgtaaaaccatgtaaccaaatacttaaatatatccacaacatctataccacagaaatgcatagtacataatatactaacatctcaaaataaacttctattacagttttatgcaaattatggtaaaagattatcacctgccacattttgaaatggcaccaacttcaacatcaatgcactagtcaaaatccttactagaagtgatgtcttctgcattatcatctgaacattcaaaatcaagctgttaatctaataaccacagtatgttatcatttaaaatcactgtatatttggatgttaaagcaggtagtaatacagcaggaaaagtgtttctaattcacagtttcaaaactaaagggtgcagttttcaaatatctgattgcttaaattggtcactcaatttaacaactgcctccttcaatacatgtaaactatgtttgcacagcattaggagatgtcttttatttcagaattagttcttactgttacagga

SEQ ID NO: 439 - DNA, 353 bp, Homo sapiens; identical to SEQ ID NO: 222

SEQ ID NO: 440 - DNA, 416 bp, Homo sapiens
gcatctaactgtccataaattcatggctacagtagagattcacggcgcaacgactttcatactggttatttttttttaattctgtcagtgagcagcatttcccagttttacactcccctaatggcagctccattaggcgagactgcaggctgcatctgtgattaggtccatgcagctcgaagatcagttcggcacgcgggagggtcccgaaagctgggtctgtccagtgtcttgcagcagcggttgcagggggtctaccagctcgccctgacagcttcgatatcgctaaccaaattctgggccaggcatatcccaaatatctgcagcaatgcaatgcctatgaaaataccagcaacgatggttaaattgtcctgcaaccacttctcaaactggggcacacagctttcgtgtagatt

SEQ ID NO: 441 - DNA, 400 bp, Homo sapiens
agtcaactggtaaagtttatttcataagtataagtaattttaagccttttactaaactgtaaatttcaatccattaaaaactactaccggagcagttttgaggtattactgttaatttagtatagaaatgttactgtattttgatgtggtatgaaatgcagccgccatgcctttcatgaaacggtgctatcgtggtgctgactacagacatgtcctatggctttcaggaaattattgtgcatgtgcattaacagattttccaaacattaatgacaatttgattggttagtcatttgtaagcataccaaaataataaagtatagcccacgtatgagccaaacacactgagacatttgaggcatacaatgctaccctccagtctactttcgtcagaaaccaa

SEQ ID NO: 442 - DNA, 426 bp, Homo sapiens
tttttttttttttttcacatacagtctttgttttaatgtttattggtagaaacagatcttcaatgcatactttgtgtttatataaactctacattctcttaaaggttttcgttttgttttcactggagatttttagcctccaagtgaacttaacatattgcctatgcatctgattctttatagacttttagattttaaagctaaatttgagaaaccatgcatactgtataccttatttaataatccaaagaattgtttgcactttcaaaaaagttacaaaaaggctgaacacaagttaaataacctatatgatgtaaattttccatttctgaatactttttcagtattatatattgcttgctgtctaataagttagattgtcagagacgcttcagtaaattatctctactttaaaattatatctga

SEQ ID NO: 443 - DNA, 456 bp, Homo sapiens
tttttttttagtcataaaaccgattatttaattgaagctataaaaaaggtagtataagtgataaaataattaggaaagaatatttagcatgtttcaaaacatttaaaataggagcagaacattttacaaaaagttgtacaggaaattaaattcttaaactatcagtacaaacatgacattacagagtatcttataaaatacaaagacaaatataaaaggactatgatgctttaagtctgaaaactattggccaaatatttaggtttaaatttacagttcctgggtatgagaatcatattactatatacatctcccaaaccagtaggtagtattttccaattaaccatgtgtggtatcatcttctacaaagtctttggccatctctgctgtgatcacatcaatatgactaaccttatttctgaactttacaccatagaatttgtcagctgactcaag

SEQ ID NO: 444 - DNA, 311 bp, Homo sapiens
tcctttatacttctgtttatttttcctgcttatgaaaacagccaacaattgcctttcaagggaagggaaggtaatgctgggaaaggtcctcaggagccctgagccaagttctcaagagagaagtgaggcagctggggatctgggaggccagagtccgggccagggcctcagcatcctagaaccagggctgcctcccgaagagcagttcagagggcgtgactccatacgggcagggcggctccacacaggcctggaacacccttctcctcagcccagggagctcatcagggtctgggcctgcttcagttctg

SEQ ID NO: 445 - DNA, 332 bp, Homo sapiens
ttttttttaatgtagattctttattgattccaccaatgtattagtagatatgataataataaatggtatttttacattctcttaaccaaaaatataacaaatatttacactcagtaaaaatacaaaaagcatacagaggcactgtctttctaaaagacataagtttaagaggtatcgaaaaataggagacaaacattgcttgttacaggataccttaccatcaatgaattgtgcagtagaattgctatctgattattacagatgtgcagttttgtttctgtcctttgctgattagcttacatgtctcaattttaaaagatcaagttcaactg

SEQ ID NO: 446 - DNA, 385 bp, Homo sapiens; identical to SEQ ID NO: 49

SEQ ID NO: 447 - DNA, 500 bp, Homo sapiens; identical to SEQ ID NO: 50

SEQ ID NO: 448 - DNA, 379 bp, Homo sapiens
tttttttttttttttttttggagctgatgcctctctttattcatgtatttcatcccctgctgcctggtttctcctgaatccccttgttcccctaaatagcacccccagtccccgcccctagcccagctgcaggtggagtagcagctgctgtctccattcagcagatgggcagactgaagcccaagagtgtggagcccagtctgaggtcacacagcagtctcctgggttcccacttggccttcaatggggagggaggacttggcctgggctccgtgcgccctcactgcagggtggctggctgcggcacgtcgcagggagctgccaatctggtctctgagggcctccagtctctgggccaggtttggaaccccggccccac

SEQ ID NO: 449 - DNA, 433 bp, Homo sapiens
ttgttttttttttagatctaccttcagttttgtcattttccagtattcacaatcctttcaaagtttcctttaaaggggaaaaaacagaggcttgtaagaaatatgctcaaagaggttctaggacttacagacatcccattccagtataagatacaaaaggcaaaatgtttcctttacccatgatccaggctagctccaagaatcctaaaaacgatgttttaatttggaatctgggatgcggcgttttgtggattaacatgtgttctgacacaaggactactctacttccttaagaaacatgagcaaaaatgctttgctcaacaacctagttatgtatgtacaaatggtgatcatggtccttactgataaaaaacttataagcaatttctgttacaaaatcgatcttgctaacaggtcttggtgtataagttag

SEQ ID NO: 450 - DNA, 207 bp, Homo sapiens; identical to SEQ ID NO: 52
  misc_feature (1)...(207): n=a,t,g or c

SEQ ID NO: 451 - DNA, 286 bp, Homo sapiens
  misc_feature (1)...(286): n=a,t,g or c
caacttgacctaagtgacatttatagaacactccgcccagcaacagcacagtacatattcttttcaattgcacatggaacattcaccaagataggtctcaatacatttaaaaggntcaaaattatgttaaacatgattaacaaaacagaacattttgtagaagagctagaggattaagtaaaaaaaaanttcctagantacgnagacactaaaagagtatataagtgaaaaattgagggaggatactgtgccnggaagtacagtgtctactagaagtttcagaaag

SEQ ID NO: 452 - DNA, 457 bp, Homo sapiens
ccagtcgggttggagtttatttctgccagagcctggaggctgggagggtaaaggacactcctttagtcccagagggaagctccgaaccctcagagcaaccagaagggagggcagagcatgggcagcagcaggagtgagaggggtccccttgtcctgcccctttgcaagggttcaaggctggtggaggcctggggcttctgtcgctcaggagttcaggggtggacgcagaaatgggggaaggagagtggctacgtagagagtgagagcgagattcctaaaaagatgcacagagagaccctcagagagaagcagagggaatgggttgcactggctgaggatggtggaggagccgtctcactcccttcctaatgtctatagatcaataacgagggaagaaaggaggacagggagctgatggaaacacagcttgccaactgtacccagtcccccaacaagc

SEQ ID NO: 453 - DNA, 526 bp, Homo sapiens
ttttattctttcttgaggcttcattttgttcaaggtcactaccttgtgatgctttagacttttgggtaggatgaataatgtgtttttctttgttgtaggaaggatccgaagataaagcttcagaagatggtatactaacatttttaggatctgctgatgaagcaatggtctttaagtttatcatagaagtaacatttttaggggctgctgacagttctgtagataatgtctgtcgaacaacataacccattggtgtccaagataactctcttgtacatgaaggagaattggtagcggcattagcagttacagattcatttgggttatttttcaccactatttcaccctttgataacactgcagctggttttactacttctcttagaagagaaatgtcggtagagacagagtggacaggtccccacttgggttgcttctgtatctctgacatattgttctctgcaccttgcagttcaggaaagtccagtgtggtaaattcaaactcaggtttggaggtagatacatt

SEQ ID NO: 454 - DNA, 330 bp, Homo sapiens; identical to SEQ ID NO: 240

SEQ ID NO: 455 - DNA, 459 bp, Homo sapiens; identical to SEQ ID NO: 241

SEQ ID NO: 456 - DNA, 418 bp, Homo sapiens; identical to SEQ ID NO: 62

SEQ ID NO: 457 - DNA, 269 bp, Homo sapiens
tttttttgggagggaagacatttactgtaggtataaaggtttactattattaacaagttatcactagtatttacatgtttataaaatggaaataaaaatgacatacacgtttggtgccaaaagtggcacatccaaactaatatcagtataaaaataaattttcaagctatgtgtttttaaaataaaggtcattgaaacagtaagggggaaaaaatctgcatctggcatgtgttgagatgcaatcatcatcacagcaaagcagccctggg

SEQ ID NO: 458 - DNA, 286 bp, Homo sapiens; identical to SEQ ID NO: 63

SEQ ID NO: 459 - DNA, 375 bp, Homo sapiens; identical to SEQ ID NO: 247

SEQ ID NO: 460 - DNA, 451 bp, Homo sapiens
ttttcctgaataaatttataatcttagtagaggaaaagttctgatgtgattttaaaaacagaatcccttctcgccttacttacttggtactttaaccattacaaatttattcaggaaaactaaaattatttaaagaagagacatctagttctagagtaatctggcacattcatatgtgaaaaaaattagaaatcacttgatacatctacagtacacaaatagacgtataaacattgtattttaataatactctttgtcacttcaatttaaatcattccattatgaaaatttcttaattgaagggagactatttcttcaaaactctaaattaaacagagctttatcaattaagtttacagcaatatagcctttagaaatacatatttcttcattttataataatacttcccctttaaaaatttgccatggtttgtcacagatttaaaataca

SEQ ID NO: 461 - DNA, 479 bp, Homo sapiens
tttttttgtatgaaaagatttaatgaattatgagccattgatcattacaaactttaagccttaatatttcttctttcctatgtaaaaccaggtaattaaaacagcctgtctcagtatgacagaagaccatagtagggataatagtaacgtctgcttccacatctgcatgcttcgttaaccaaccaaagaaagtgctccaggtttcccaagtcaacaaagtatactcagttacactttccctgatcatactatgaattgaaacagaacactcctttgacttttaatagcacttttcatccacggcacaagcactttcccattattttctcctttaccctcaatatccttgtgaggtagtgaagggagggagcaaggattttttttttctattttgcagatgagaaaactcaaggtgaattttacaacagtggttctcaaccttggcagcatattgaaatgaccagaaagtttttaaaaat

SEQ ID NO: 462 - DNA, 240 bp, Homo sapiens; identical to SEQ ID NO: 64

SEQ ID NO: 463 - DNA, 435 bp, Homo sapiens
taagtgatgaaagactgaccagtagaaggtggtgaagatgaagaatagtggaactggcaagtaagaactgttcagacaagcattcattgtgtaatatccataaacaaaactataatccaaaggacttccattttagtatgttctgatgatgtactctagactgtcacctcctctggcttacagaataatccagaactttccatagacattaatcttgcttaacaaaggctgtttacctattatacacacacatttttaagggaaatatatgtatatagctttatctatacacacacatatacatacgtgtatatatagatttatacaaatgtataaataaacataatacttttcaatctttccattgacaaggcaagttcacattcagcaaagtgccaccacatcccatatacacatctctgtacagatatacac

SEQ ID NO: 464 - DNA, 387 bp, Homo sapiens; identical to SEQ ID NO: 249

SEQ ID NO: 465 - DNA, 443 bp, Homo sapiens; identical to SEQ ID NO: 253

SEQ ID NO: 466 - DNA, 531 bp, Homo sapiens
tttaatatttaatatttgtagtttaattttctgaacctttggcttataaatttttctcaacttacatttaaaaatgtatcaatgcaccttcttcagtagtaccacatgaaaatataaacctcgttcttccatatcttctacgcaggaagagtgaatgaatagtaccctaaatatcccgcaaagttactttgtgtacttgacggaagattagggaaaaacaatccacttccatatcttgagcagtagttaactagtcttctacctcatcttcccaaatatcgtcgtcaacatccacagcataaaacagccggttaaaacatggtgaaccagggtcattgaaatgtttgtaagggcgcgactctagagagagaacccatgcaaatccaacagaaatattgcatacagccagtacatgtcatcttgttacatccgtctaatttctctatgggagttccacaacatgggcagctctttgagttcttctctagccactccttactttccatctcttccagtgccttctgaatcact

SEQ ID NO: 467 - DNA, 416 bp, Homo sapiens
ttttttggatgagtcttccgttttattacaaaaatgaagatcagtttgatcaaaatgaaagcttgttcacaagttttacatgaatattctaaatacaaagtctcctgaaacaacatacttttgatatgattttcatttttaaagggatgcaaacattccattttctcatttataatctattccaaggcaaagtattttaataatgtatcctttctgcagttagatcacaattcacaagtataactgaaacagacaaaaccttgtcagcaaaggttaaaagtccttttttctttaaaaaaaaaaaaaaaaggaggtaaataaccagcccttatgtgttttcagaattttgtactacactgacatgatttgcagtcaggtttttcttcctaccccttaaggctacaaaattctgttgc

SEQ ID NO: 468 - DNA, 338 bp, Homo sapiens; identical to SEQ ID NO: 258

SEQ ID NO: 469 - DNA, 337 bp, Homo sapiens
tatccaaccatttataatctttattctataattctccgccagtgctagaattttcttcccaaatggcctcaattcggacactgaataaacgataatgaattttttaaagctgtgcttaaatataaacaaaataaaccgctaagtttttctggctccaagcacgccatatgaagcacgccaatgtcacttatgtgccctgatcacattcaggcaaagtgttcttcactttaaatactcctgtgttccattattgtttaagtaaaatcctatttcaaatgcctttgataacagagaaaccgcctgtagacaaactctttgaaagtgactgaattaatgt

SEQ ID NO: 470 - DNA, 393 bp, Homo sapiens
tttttttttttttttttctctgttatgattttatttcttcaattgttccaatcacagtttctaatacagaaataaaactattcagcgtctccgttcttgcttcattttgtttcacagagatctgcatttctgagtttccaggctccaatagcagttctgttaagaacagacagccagtatcatcctgagcactgaggtatgctttccatggccgagacccagccctactcattgcgatggtctggatgttcactacttgaagagccatctggagggtgtcaggatggaattctccccgccaaggcaacacttgctgatgagcaactttaaggctaagccaagttttctcaaaataatcagcagtaagctggcgattggggactagcatgaggg

SEQ ID NO: 471 - DNA, 545 bp, Homo sapiens; identical to SEQ ID NO: 260

SEQ ID NO: 472 - DNA, 412 bp, Homo sapiens; identical to SEQ ID NO: 77

SEQ ID NO: 473 - DNA, 263 bp, Homo sapiens
tttttttttttttaagatgtataaatgacttacttttaataataaatatttcttgatttataatgtaaatacaattaaacaaatatgggttactcgaattaaaaaaatggcacatgtaaatgagcattttagtacaaataattaaaatgtatttatattatatagaaatctacacaatggaagatactactaaaatgttgctctacagcacatcaccctagacaaaatagaattctagaattctctttaaaaaaaaaaatcac

SEQ ID NO: 474 - DNA, 317 bp, Homo sapiens
ttttttttttttacaataaacatttattaagctgtaattttcacaatattttaattctgttctgagatctacaaatatctctacataacaccaaagccagtgatttaataaataagaggaatgtatatatcgctttgcaaaaaaatgcctgatacatttatctctatataagatatttgtagaatcagtttcccaaggctcacgaaactaaagtgcacacacacacacacaccatgtacacacacacactattcaaatcaaatggatttatattaagtgccaaattaaatgctatacaaaatttataaccagataca

SEQ ID NO: 475 - DNA, 295 bp, Homo sapiens
ttttttttttaaattaaaatgaccttttatttgcctggacaacaaaaattttccatgattttgcttttttgaaacaatgataagaaatttttttttaggcaataagatactaagttgtatcaacaaactgcatgggatatttccacaaggagaggattttgttccctgatctagtttacgtgacattttcccttatgcttgctttctctgagctgactcttcttaaactgacctagatggtaccctatttcaactgactcagagttcattcaaaaatatgatatggtgacatggc

SEQ ID NO: 476 - DNA, 526 bp, Homo sapiens
tttttttttttttttttttttttttcagagacctttttttattaaatgtgtaaaaagcagttctcatcttacaagctcaaaatcagacgaatgtatgagggtgtataattgttatatttataaactgtatcacccaaaaactcaatgaggacacaatctatattacattcaacatttgcatatttacatgatacttactgcaaagtaaatacaaaatgaactcccatcattttagttcagaacacaggtgatataatttcaaaacaaaggcaatttttttcaacaaagaacagaagtctcccaagtaccaattcactattttgcagaaaaatacaacactaattataagatttccattccagtttagtcagtaagatgcgttgtttgtttgtttgtttgttttgtttttagaaacagggtctcactcggtcaaacgggctggagttcagtggtggcgatcagattcattggagccttgaacccctgggctacaaaatttttcccactagggccccaagagctgggg

SEQ ID NO: 477 - DNA, 702 bp, Homo sapiens; identical to SEQ ID NO: 264
  misc_feature (1)...(702): n=a,t,g or c

SEQ ID NO: 478 - DNA, 441 bp, Homo sapiens; identical to SEQ ID NO: 266

SEQ ID NO: 479 - DNA, 419 bp, Homo sapiens
tttttttttttttttttatgctcaaactaaggcattttattagctggctttacaacttaaataatatcttggctttcaaaggaacagcttccactaattccaaattaaactttcacaagtttacttgtttggggagggacattcttatggtcaccacaaaatacttttattataaccttccccaaatcttttcttagcattaactggaaaaaaaaaaaaaaaaaagcttaggtcaaatatcaactgcctgaaaaacccaattaagttacttttccttaaaacatgtgcagtataattgaatcaaaagagaaaactgcaaatacattgtgctttggccagaagtagagttcatttcatgatgattcagtatcttcagatactatttttgacacttgccataaatcttagcaaagtaaatc

SEQ ID NO: 480 - DNA, 474 bp, Homo sapiens; identical to SEQ ID NO: 267

SEQ ID NO: 481 - DNA, 450 bp, Homo sapiens
tttggttttccaagtgttagccatttataaataagtacatttgctttcatacatacagttccttgtacagatgacaatctgtatacatggggcaggaaaatgcattcatttgaacttttcacatctatctcacacagctcacatgtacagacaataaaactgctcaagcaagtacagcaaaggaaaatgtctttccttatacacaggggtagatgcctctgtggggtgtggggcatccccactgcacggcttcacaactgtgtggtgttcaatatatcaggagagagaacaaacatgcattggataatatactgtacagagaaagtcctttacatctgagtcatagaaaacctaaaggaaaactaagtgcattaaagctttttccagcaagtgtcttgaaaggacagcaaagaggaggaagaatcaaaatcatattagtacaaatcactc

SEQ ID NO: 482 - DNA, 135 bp, Homo sapiens
gatcccaaagatattaaatatatgcaaatattccaaagtctgaaaaaatccaacatccaaaaacacttctgacccaagcatttcagataagggaccagaattattagattaaataaggtatattattaagttaaa

SEQ ID NO: 483 - DNA, 205 bp, Homo sapiens
  misc_feature (1)...(205): n=a,t,g or c
gatccctcactttatttatattcccactataaccagtaagttcatttcataggccctatcatgcattaatcattgnatgnnagnagttaatgaaaacttttcctgttacaacgcccattgccggcaatgaacgtaccaaaaccgccaaggaagtcattgttattgcacaatacatgaggacctggagcttttccaaaagcttaaa

SEQ ID NO: 484 - DNA, 409 bp, Homo sapiens
aaacaataacagrggtcaaccacagatgtggacctccagcaataaaagcaggaattcagtgccagatactcagcatattaggtttcctacgtaagtcacagggtaatatgttctaaatatctctaatgtgatccaaaaccctaaaaagagctggcacaaaaccatcgtgaatgactgcctctcttgatgtaaatttttaaaaatattattacagtatcatagtccccactaacaacaactggggtacatataacaatgtattgtgaaattaagtgtatttattctctttaccaatagcaaatgytaccctaccttagtaaaaccaagacttgcttcaatcaatbctgttttgtaaaatagcaaagcaacgaatgctgaaatcattcaaagctgcattacttggggtaaa

SEQ ID NO: 485 - DNA, 383 bp, Homo sapiens
aaaagctacaaatttttatttagctattattaaggcacgtaggcacacggacagaacaggtctcataggtaaccagttgtgtttcctaatagggtgaatacatatcattgccatgaatacatcttttatcataaaatgccaatgagcatcaaaagtaaatggtttgattgttgttgtcactgttttgtttaagaaaaatagggccttaaaataagtgcttcagtggaattcttgaacagtaagtagcctgttgatagtggacctagtttaaagcaccacacaacaatgtgtgtttacatcacccctttatttcatagttagaactaatacagttccacagggtaaattgtcaataaataatggtgtttaatcattaaacataa

SEQ ID NO: 486 - DNA, 204 bp, Homo sapiens
agaaagaggattgtaggttttattgactaagaagataaagggatgcaaattagttatacaggttttaattccagacaacagaatagtggctattaacaataaaatcagtaagtattctggvcatgtttaacttgaatattcaggtaggggrttttattggaaatacgggtctagrgctagtggaaggbgaacgcctagagmccc

SEQ ID NO: 487 - DNA, 425 bp, Homo sapiens
ttttttttctgaaaggcagggaaagcttagcactttttaatgcccattcccattcaaatatactcaatttgaagttattcaataaagtcaaataataggtaaatacatatgcatacaagaaaatcagaaaatcttaaaatatttaatccaaaatgaagcaagaaggatcttatgtggtctgaatattgtcactttttataaaaccaagcctttcctccttcagcagagaaggctgaaggtgaacaggaccaacagagatcaaacaggggcacagaacagaaagtagggggaggaagaagagatgttttattccagaaatgaaggaaagtaaattatgtttttgtatcccaaagtcttaggagggttagggcatgggtgggctcatgcctgtaggtcccagcacattggggagggccgaggcaggg

SEQ ID NO: 488 - DNA, 141 bp, Homo sapiens
  misc_feature (1)...(141): n=a,t,g or c
actcngcaggtagcctggttttcagaaacaacgatgaatgatgcaaatatctagaattcagtgagtatttatcatagaagcaacagcaagaccactactattgctatatctaagtaatatcccagttaattgtcctagagt

SEQ ID NO: 489 - DNA, 421 bp, Homo sapiens
gagttttatttaatgtcgggagcagattgggtaataaaatgtattttgagaataagactgccttttgaccttttagggtctagggctgtaaagtgtctcagggttgctgccaaacaagtcatgaactgggctggatttttatatttgatgaaaaagagcctaaatgctatctgatttcggataaagaaaaaggagcattaaccttgactatgcctttagctccagccacctttttaagagtaaattgctgggcaggagggggagggctagtcacggaacgaaactgtaagccggaccaggtgtgaggaggggaggcgataaaaagattatagggtggaggagcagaggctgaggaagaattgggacctagctcggcctggcgagaagcagcctgggaggaagggagaggtcagatgggtct

SEQ ID NO: 490 - DNA, 192 bp, Homo sapiens
  misc_feature (1)...(192): n=a,t,g or c
acagaaaggatgacttttatttccatcctgaatgattcacaccattatttaaacatctgaaaaatcctgaaataatttaaactgaaggcacagaacaaaccaaaatatttaactatcagaactaaaaatcgagaaaatccaaatagttctatagtaacaataaattatgaacaagtttccgtcaacanaata

SEQ ID NO: 491 - DNA, 433 bp, Homo sapiens; identical to SEQ ID NO: 274
  misc_feature (1)...(433): n=a,t,g or c

SEQ ID NO: 492 - DNA, 318 bp, Homo sapiens
  misc_feature (1)...(316): n=a,t,g or c
ttttttttttggttttactagtttggaagcagttttaatgaagatggaaatgtttatcaactcaacacaggtacccccaaaatacaaatcaaaatatcatcttcagctgcatagcaaatatgatttaagaatttaacatcattatttgatcacaagcgtaaatatgtcaccataaataaatgtaaattcattgtacaaaaattcccaacaactcttaatacaaatatgggtacatttgacagtttctgaaacaggattatttttaaaactttttaaaacctaaggctttatttttttccggggntattggacacacac

SEQ ID NO: 493 - DNA, 484 bp, Homo sapiens
  misc_feature (1)...(484): n=a,t,g or c
attatanaaatagctgcaaaattgtcctcttagctgaaaatcatggatgacctcagggagggtacagagattagaagaaaataaagtaggcatgccaaacatttcagagctagagtgatgtaagatggtaatataggccagatcaggaattagaaaaaaaggataaagagcaaaacagtgcctcgtggccagcaaccttatagtcatgtaggactgactcccctttgtagcaaagaaaggtgagactggttctgcaggtggacacctccaacaggagggcaacctgttccagctctaacatttctttcgttctaattactttcctctttccttctgataattccaccccttaatgccttcaaaaactagcttgccctgatggcaaaaatcttaatccctaaaatctctttccnttctaaaattttcttcccacgngtttttagggctgttcactcaggancaagctgttctaatttaaatgttt

SEQ ID NO: 494 - DNA, 432 bp, Homo sapiens
acattgtaacaggtttatgcattttgaagtgccttctacacatccacccagaggctctgctgatttcacttatgcccaggctataaaatgcctttctctcatcccccagtagagcactgggatcaccactaggcctagggggcatatcaagggtttaatagactgggggaatgggcaacagaactggctaccttagaggctctggaatgccccccacccatccacccaccaatggaaggaaagtcaggcatcgctaaaaggagtggtccctatctagccccaagtctggagcagaaagggcaggtccattctggcccaagtgacattgttaagatcctgtcccctcccccaatcactgctgcttgccagggtgcctcttcacagttcccatgtggcagcagtagtggcagaggcagaagtggacttattgta

SEQ ID NO: 495 - DNA, 428 bp, Homo sapiens
aataggttacttgcaattgttattgcaggcaacaacttgtacatgattttatttccaaatccacaaaaaacaaattttatacaaatcagcactgtaaaaatgtcaattacagccccagaggctttgctggcagaataattgtctaaattctagaatatgggaaacaggtttttttctggattcatctttttttttcatttttttttttttacaaaaaaaatttacaagtgaaatgttactacaaaactttttataaggaatttttgcaaaacatttacattttaccatcaactatttctgttttaaaatcattatgtagatttaataccctatgctgcacatcaatttatgtgggatgacaacttagtgacatgcataaaaaaacaccacaaggcattaaaatggagacttaaatacaaatattgttg

SEQ ID NO: 496 - DNA, 250 bp, Homo sapiens
tctttttttttttttttttagaagcagtttattacaaacctgagataatagaaaataacacttgcagtaataaaggaagcagccttgcactccacctccacactccagagtataattaaaagactcctatcagacatttctatcaccaataatgccaacctctgtatacagcagcaagaacgggcccaaatcagaagattcatgttgcttgctttctctataagggaaagtgaagctttcggtaagtatc

SEQ ID NO: 497 - DNA, 265 bp, Homo sapiens
aatgcacctttctcttattttattttttaaaataagaacttggcattgaaacatgaaacttgagttttgaaaactaccctccaagatgctgaagtatgtttactttttctttgtaaaagggggcttaacctatgtttctgaaggtctaagtctgtgcagataaattatatgacatgtatctgtttttaaaacactctatatgctggtactcacatagaaatagaagccagaatgagaagcctcccaaattatcccatcctgacag

SEQ ID NO: 498 - DNA, 193 bp, Homo sapiens; identical to SEQ ID NO: 283

SEQ ID NO: 499 - DNA, 319 bp, Homo sapiens
tcacatccttgtaaatgtgaactgtgatactatgaagaggtggaaggctgaagaattcaaaatgttcgccccagaaaatattgtctgctttggtcttgctggttgtacgagcaaagagggtatcatcaaggcacagttcgcagaaatatttctttttaggggcaaggtccttggcttcaatgatccataaacgaagaacattttcagctcgcctgcaattgtccttattaggttgaactgtcctgcgaaggttttccatccacttgtctctctcagaagcagaattacagctgaagcatttacttccacttaagtaggt

SEQ ID NO: 500 - DNA, 453 bp, Homo sapiens
gaattttcaattttacatttaattataagaccacaataaaaagttgaacatgcgcatatctatgcatttcacagaagattagtaaaactgatggcaacttcagaattatttcatgaagggtacaaacagtctttaccacaattttcccatggtcttatccttcaaaataaaattccacacactatcaaactaaatcaagatttgctagtggataaaattaccataaatataccgtactctctctgaaacagctacaaacatcttgtttttgcaaaatatacaatgtttctcaatctttctgtccttatctcaatttgcaaaaatattttgaaacaatctcctttaaatgttattcttgttaatgagggcaaatcttttaaaatccacatgctagatcttgaaaacgcttgagaagaaaataaactgtgaaaggagtggttatttaaatacttc

SEQ ID NO: 501 - DNA, 298 bp, Homo sapiens
tcatactaaagagaattttcatatttattcataaaataaatgagatatatttccagctgatctcttccaaagttctttatatggttgtttaaaaataaatcaaaacataacagatacatttgatgggtaataagcattttacattctgtaataaattttagaagatattaggggcaattctaaaaaaaaataagtttatctaggattccttcaaggtttcctattttgcttctcccatttttaagttaagaacacaacaaaaatgctttgaacaaaagcaaagacagagtagtgtagc

SEQ ID NO: 502 - DNA, 303 bp, Homo sapiens
tttttttttttttctgttaattttttacagctttattttagacagatagtttaagaaccaaagacatacctctgtaatgataaaggaaagaaaacaagctttccttttaagaaaccaaagagcacaaaataagactgtttcattatacataatcaccacaggatattaggcactctgacagggttaggcaagattcttggtgtgaggtgaagcacaggcactttatttgtacagtgctgctgattctaattttgaaggtaggtattataaaagtctttacttgtcaccttatttctggcccca

SEQ ID NO: 503 - DNA, 320 bp, Homo sapiens
atgttgtgaaaaggaatctgtaaaagtcagttttatcacaaattgtaaatattattgaaattgattgcaaatttagatcacatacaaatgagagtctgacattcaactgttttcctatattccaaagtaaacaattcctttcaacactcaagacttaaacaggtattcttagagggttatatgaattgctatcagaagctgttggctaacaagccagtaatttggttctttcaccagaacacagttccagataagcatctttgcactatttctcaagtatgaatccccatgtggggggaaaacggatatactttcaatag

SEQ ID NO: 504 - DNA, 412 bp, Homo sapiens; identical to SEQ ID NO: 88

SEQ ID NO: 505 - DNA, 351 bp, Homo sapiens
aagacaaggtcttactctgttgcccaggcgggagcactttgatttaagtgaaaaaactcaatgcatcctggaggatatcctagaacagaacatggaactcttctgcattccttttaatagttgcatagaattccattgtgtatatcgatcgtgatttcttccaccagattttgttgatgggtatttttttgggttgtttctggtcttttgttctcatgactacatcttaaccagtggttctaagatgtggtacccagaacaacatcattactacctaaaaatctattagagaatgaaaattattgggtggaagcccagatctactgaatcagatactctgaagtgaggccc

SEQ ID NO: 506 - DNA, 497 bp, Homo sapiens
tttttttcagtattttccttcactttaatttttattgcttctccagttcagataattcagcgcttcctctttcttcttcctcaccttgttcatggctggctgttccatcagcagaacttccagcgattgccacattcattgcataagacaaaggtagtcatgggctcatcagcactgcgtgtctgcacctggttataggtgcagttcttcttcttgcatttgctgcactggaagaggtcagtggtggtgccgccagtcttggccatctggtgctcacggatggcctcctgggtcatggcattcctcaactccctcagttcatcactggccatttcctctgccgtcatcttggctataagcctgcggagatggccccactgagcacgttccgccgcacgcggggttcctggggtccttgaggttgcttatgcggctgcgcacgcggttccggtacttcatgtccgtgctcttgagctcttggtagatatgatcttcga

SEQ ID NO: 507 - DNA, 449 bp, Homo sapiens
tttttttttttttttttgattattgatttactgtgtaatcaagagcaaccaaaactacttctcaattaaaagtacccaacaaaacttttgagccttcatgctacttcaagttaaaaagaaagcaatgcagcttgtgggtttcagaaaactgggccatccggatgttcatgcagtacaagtttcaccaccatactatttccgagagttcacatttgtcaaagtgcagttaacccaaagttgcagcgacagtatatcatgccagctgaatccagccacgtatctgagataggatcatatttctgcactgtattcagataggaagaccctgagtgaccaccgacgacataaaggtagttatcgattacagcagcaccaactcctgttctaggttctttcattggtctacacacagtccactgattttgatgaggatcgtatctttcaatgct

SEQ ID NO: 508 - DNA, 398 bp, Homo sapiens; identical to SEQ ID NO: 90

SEQ ID NO: 509 - DNA, 457 bp, Homo sapiens
ttttgtctaaagtactttcctccatccattactcactctaaatgccatgtgtccttacgtattacaaatccatttctctaactactgaattttccatttaactcatggcattaggatgctgaaatgaaaaaagcagtcagttacctcttgtaacaacggaataatagtatgcaggggcatccttaatacagtcttctttataaggtttacattcctagtttgaagtactttctgtgagaaaataaaaggattattaagatgagcatactgacaaaccaaggacatcacagaaaaaaaaaagtctgtaaaaatgaatcccttaaatcatttaagaccaaggcaataaactacaaactgaatttagcaaaaataaaggttggagggactgaatggagtatgttatattacgtcttgtgcttaacagacaagcacagtctttgggtatcagtaaatttac

SEQ ID NO: 510 - DNA, 391 bp, Homo sapiens
gcagctgttgtaaaagtggttgagttcttgatttgattctctgcttggtcactgtagatgcatagaagagctactgatctgtgtacattcatccagtatcttgaaactttgctgaattatataatcagttctagcagttttctgggggaacacttagggtttggaaattaaataacctgctcctgaatgagctatgggtcaaaaacaaaatcaagatggaaattaaaaaattcttgaactgaaagacaataatgacccaacctatcaaaacctctgggatacagctaaggtggtgctaagaggatagttcattgccctaaatgcctacatcaaaaattctgaaagagcacaaacagacaatctaaggtcacaactcaaggaactagggaac

SEQ ID NO: 511 - DNA, 411 bp, Homo sapiens
tttttttttttttttttttttttgtagtaaaatggccagatgtttattattttgttacattatttccattgcatattccacatctatttattttcacttttatttattatcattatttttcacaaaggtacaaggaatttcagaaacaacattaaaacaatcattcaaactgtttcaggcacggtttcaattaaaagcatagatttgatttctgacttcctgtttccttctatgatacaatctcaagttttgtttcaggaagcacaattattgtagcgttaaggtggatacctgccaaagctcatctcctagtgctgtcctcattctcagaaagttcctgagtcaacagaaaggggacgcccagggtatggaataaggagatgagagcatgctctgccaactggctgggac

SEQ ID NO: 512 - DNA, 269 bp, Homo sapiens
tttttttttatccagagagattaatacacagattaatacacaaaacttttgtaaatagcattccagttcaaagttgcttgtgatcatagccacgtgtgaaccgttagacaagtgtatgctatgccccaaaatgttttataattcttcagtgcagtttcttactgatgtttcccttaaaattaaggcttaatgaaagagaaatccatagtattatgaactgattttctttagcttctgaattaagtgcactctttccaaaatcaagtggt

SEQ ID NO: 513 - DNA, 366 bp, Homo sapiens
tttttttttagtgtagatatagacttttaaaggtaaaaagaaagaataaagatggagggtgtgataatcctatgaagtgtctgggtttgggtcctgagggcagccaattacatcccagactcactggcaatcaacagtccaagccagggtcccatcagctgaatcctgaggtggggatgcttcagtctttacagaacagggtcaaggaagagtccagaaaccgccgtcattggcttcatgaaaaccgagcacgtctttgagatctttttcaaattctgcctctaagtcaagtcctacctggccaaagtcagaagccttgtaaaatgttttatggttgcgaaacatcaggcgcatgtctcgcacaaa

SEQ ID NO: 514 - DNA, 418 bp, Homo sapiens; identical to SEQ ID NO: 293

SEQ ID NO: 515 - DNA, 195 bp, Homo sapiens
  misc_feature (1)...(195): n=a,t,g or c
gatcagaactgttaccaaaaaacaactgtcagttttattgagatgggaaaaatgtaaacctatttttattacttaagactttatgggagagattagacactggaggtttttaacagaacgtgtatttattaatgttcaaaacactggaattacaaatgagaagagtctacaataaattaagattttngaatttnt

SEQ ID NO: 516 - DNA, 125 bp, Homo sapiens
gatccatgctttactgtgtttaatgggggtaacaggggtccctacagccctcccagctaaacatttggaacaaaacaccagcccttttgtagtggatgcagaataaaattgttaatccaatcaaa

SEQ ID NO: 517 - DNA, 353 bp, Homo sapiens
  misc_feature (1)...(353): n=a,t,g or c
ttttttttttttttttttttgcttcacaaatgtcaattttattgacactagtgcacaactaaatacaataattgcaaaggaagtggaacgtgttcaaacagaaatggtgacaatgagttagaactgcagttntttcaaggtactacactattatttaaaaaaaaaatcacaaanagaaaaatgttatcactacaagtagggatttaggaagngagnaaattctgggcagtctgtctagnagggttaaaacatttcatggcatttgtgagttgctgttggagagttgttttttatttgtccaccgtaatctgggcaacatccgggggcttaccttcagctctcggcactgtgcg

SEQ ID NO: 518 - DNA, 290 bp, Homo sapiens
ttaggaagaaccaaaactttattattaatgttctgtttatttacttattttttataatattttataaataaactttattcatataaaacaggccaaacatctgactttcaaaaatggctactgttataaaatcagaaacatagagtgttgggaatactgaaatttctaaacctttatgaataacacaattgcttaagttatatccacaaagaacagaaaagaggcaagcttgaaaatgtgaggatagaaaggtatcacagtgatgtgtttttacgaaacagtaccttccc

SEQ ID NO: 519 - DNA, 453 bp, Homo sapiens
  misc_feature (1)...(453): n=a,t,g or c
aaaatcaaaataaaagatattatttgagctattttcatacaaactgttggttccttatatcctcccttctataataaagggcatattttactgcaaagaaaattttactttatatatatcactagccataaatttttgaatgtcattaattacatgttgtctagtaccattaaccaaatagcgtaactattttatgtccacatttcacttctgtatttacaaacatatcagtaaagagttaacaatgagatgcgatcaaacatccatattatctgttttgtagacagcaatgtagatgattttgtaatcacctttcatcggagtgaccttatataaaaaataagtcaataatttagaggttctaagtctccaaagggggattttccaaatggtaaatataggaaatggggtataggataatgggganttttagggaacccccggccntgggnt

SEQ ID NO: 520 - DNA, 434 bp, Homo sapiens
tttctgtttttatttatgcctttatttatttttaccaatagttgatatacctatataatattcacgtgccacaaaaatatgagaagattacatgtgaatattgatctcatgggtgataaagtatacaaaatgttgattaactgaagcagaaatccattgagaaatgcttataaccatcaggtattacatttacagatgttgccaagtcaaagttgaacatccacagtgggacactcatcataaactctgtttaatctttaaaaggagacagagaaatagccaagtacgtagaataaaatctgcctaatcattctcctacgattcttctatgcttgagttcgttttataggagtcttattacatgcacgtttacattccttcccgatatacatattctcaaggaaacgtggcatcctgtagcccctgcttagaat

SEQ ID NO: 521 - DNA, 346 bp, Homo sapiens
  misc_feature (1)...(346): n=a,t,g or c
aatcttacctatagacttgcatgattcaagataaaatgctttttaaaggagaaaaggtacagaaaataattttaaattctgccggaaagactggtataatgttctaaagtcactcactggccataacctatctttgctccttaatttctcattaatcctaacatcacccttagacacagcctggtatctccaacgacactcctcttaaataagccttgcctagacctgcttctcagcatcaactgttctttctacctacnatgcnctcctctcccatccaaaggatctctcttttaagacctaaattgagttcttccagtaaactttccacaacagtcacagccca

SEQ ID NO: 522 - DNA, 304 bp, Homo sapiens
  misc_feature (1)...(304): n=a,t,g or c
tgtagagacaggcgcttactatgttgcccaggctcggttttaaactccaagcctcaagtgatcctcctgccttggattccaaagtgctgggattatagttgtgagccactgcgcccaacattcccatgacttttttgtgaaggaggcattcaccaagcttttcctaatctttaccataagccaggctctgcggtaaacaccccacaataaatgtttatcagaggacttagcagggaagtacattaaatgttaacgccttaatctgatactgaaaataaaagataatttcaacttggtttttnaa

SEQ ID NO: 523 - DNA, 147 bp, Homo sapiens
  misc_feature (1)...(147): n=a,t,g or c
ttgacaattttaaattataatttttattcctcagtcaccactgctaatccttcaatttatttcaaagtaacttctggtttttattacatttggaagataaagcaacttatcacatgtaggttacaacttaaaattcgtgnattgang

SEQ ID NO: 524 - DNA, 307 bp, Homo sapiens
  misc_feature (1)...(307): n=a,t,g or c
gatttttatattttattatgtgtttccttttactgaagatctttgtatcttcataaggctttgaataagagagtttggtaaggtttatgggtacagatcaatataataataacggttaacaattttttttttttgagatagggtctctctctgtagcccaggttggagcgcagtggcgatactacaagcccactgcagccttggtctcccgggttcaagtgattctcccacctcagcctccccgagtcatgggnaaaaaaagggccctngccaaaaggcctgggaaaaatttttgggnaatcctttt

SEQ ID NO: 525 - DNA, 403 bp, Homo sapiens
  misc_feature (1)...(403): n=a,t,g or c
gcaagtttaatgtctctgctgtacataganttaagaccctttccccctcctcatccttatgctggcaataggatatgcactagaaaatttgactcttagagtcaatgantaaaaggatgggctcatacaccttcatagctcttttcaaaaaggatgcttataatttaaaggatgtcctaatgggaaggaaaggtacagggcaagaggctgtttcacattttagtccattagtctttgggcagagccaaccaaggccaanttcacctagggatgcccaatggctgtgggggatctccacaggggtcaaggtaaggcaaaccccaattggaacatgtttgggatttaaaaaaaaaacaagttccttggaaactctttgnaggggngggctttcaccctggnaaag

SEQ ID NO: 526 - DNA, 430 bp, Homo sapiens
  misc_feature (1)...(430): n=a,t,g or c
ctctgtctgaaatgggacatgaaaggagtaagaggatgggggtgaagggaagggaaggggataaggaaaggctaggtggccacatctctctgctgtgacctcgccatctggaaaatnttctgaaaggaaaaaaaaaaagagttattgggaaggcacatctcctcttatctggagacaactccacaaacagaagctaaaaaggtatgcctgggatgactcaatctgattggccacatctttcttgatataacttctcatctagantcatagccttttagagccggaagggacccttgggatattaattacgtgggttcagtccttccctgttttcacagaagaggaaaacttnaaagcttaggggaggcctgattttacccccnaaatttaccaccagngggggaaaaaaangcccnggggggnaaccccc

SEQ ID NO: 527 - DNA, 390 bp, Homo sapiens; identical to SEQ ID NO: 311

SEQ ID NO: 528 - DNA, 144 bp, Homo sapiens
gcatgtgcaaaacaccagacacatacagaaacaattaggattctatgagggcagagaatttgtttctctaaatggggctgttcaatgtttcacagagcacaaggacaagaaattcaatatttttgagcagaaggaagaactcat

SEQ ID NO: 529 - DNA, 315 bp, Homo sapiens
  misc_feature (1)...(315): n=a,t,g or c
gcttctaaatataaattttgctatttagccatcagctaaatgatctaaatgcaaaccccaaagtttccagttaaaagtataaaanctgcttctaaccacagcagcatactgcttcaagtattctcctcctatgtaaggtcgagataattttgtcacatatgaattttaggtggacatctcatttcctcacatattagacatcctgctggggtcacagcttctttgttccatttgtctttttttgttgttttttaataagacattgcaaacagtagctatttcttaaagtgacataattttcgcttttgcattctg

SEQ ID NO: 530 - DNA, 484 bp, Homo sapiens; identical to SEQ ID NO: 99

SEQ ID NO: 531 - DNA, 287 bp, Homo sapiens; identical to SEQ ID NO: 313

SEQ ID NO: 532 - DNA, 428 bp, Homo sapiens
  misc_feature (1)...(428): n=a,t,g or c
tattttttgagacggancttggctctgtcgcccaggctggagtgcagtggcagagtcttggctcactgcaagctccacctcccaggttcacgccattctcctgcctcagcctcccaagtagctaggactacaggtacccgccaccacccccggctaatttttttttgtatttttagtagagatggggtttcaccatgttagccaggatggtctcgatcttctgaccttgggatctggccacctcagcctcccaaaatgctgggattacaggtgtgagccaccacacccatcctcgcccagttattaataccttccctcttcaagtcctaaccttgcaggctaattcctccctggaagaagaggattccaatgctcctgagcataaaaaattcaggtccttgaatgacgtggacccattctccagctct

SEQ ID NO: 533 - DNA, 496 bp, Homo sapiens
  misc_feature (1)...(496): n=a,t,g or c
tttttttgagctttcagagtggttttatcattaaattaatatctaatcacataattcaaagatataaaaattggaatgtagaaggtggggcaagcccctccctcaggactggaggcggcacagggacagagccgcactgaagcgggtgagcgtgcgagaaacatacagccgagcagntgccccgaacactcagtccagggtggaagcatcgccccggcaccccccaacccccgagcccactgcgcacccacaggaagagtgcaggcttttcacatttcagagggtggggtggggtggggtggggcggggtgggcccctggcttttggggctgccctccagcagccctggaaggacacaggcggtgatggtgggagaaaggccccctctcccaggggaggcctccttgtcctgagcttgggctnaggtctctgttccagtaacagatgctggtttttgttttgtttttttttttaagacaaggtntcgcctcgtgcc

SEQ ID NO: 534 - DNA, 492 bp, Homo sapiens
  misc_feature (1)...(492): n=a,t,g or c
aagaaagaaaataggaaaaggtgtcaagcatagaggaacactcaaaagagacaaaacattgacctcagcaggccaagaactgttgaaaaataataagatgagacaatcctggggctgtgtgggcagtcgtgttccctgaggccacatttggaacagtgcatctttatgccagaaatttgagcccgagattactacattgtgatcttatgatcaaacctaacaagacaaagacacagccaagtggtactgcttttaatatctcagagttagctgtagggatccaattattttcagtttggatacatttcccctttatcaatatctccatgtgcataaataagatgaaagtggagttccagaatcaaaaagagatgggaactcacatcactggggcagacttgttccatctggaagtgtacgggccagtctctcccacgtggatttcctgatgtctggccccaaatcttcctatcgaaggcgacatcctttttn

SEQ ID NO: 535 - DNA, 489 bp, Homo sapiens
ttttctgtgtgttaaaataatgtaattctccctgtacatttctgtccacatgagccaataaacatcaagaatacacactttacagtatttacctgttttaagacattcaagtcaattcagatggcaaaagtagaattcaatcactagtgaaatgttttaaaaatatatattaaaccaaaaaagtgtttttacaagataaaaaataatcttccacaatgtaattaattgcagatcactgaaattttaactctttagatgatttcagttcagttttttggtttcaaaatctagagacagtcaaacaaaagcacaggcagaatctctatctgtttttacgtttctctttcttgctttgactacttgttgcgctgtttaaagacgatgatgaaggtgctcttgcatgacctgtggcctttagatgggtcaaaaagtttattccgagatggaaattcactatgggcaggttgtacagctggataagaacactca

SEQ ID NO: 536 - DNA, 459 bp, Homo sapiens
catttttctttttagagacagctctgaacacagaatgatttcataatcagggacatttttgagacaggagacttcatggttccaggctttgagtgaggtggagaactcctaaaggacccacccaggagatgacactgcctgaacagataactgtccctgtcgcctcccactccactctacagcgacaccccttccacagcagtcagctgttttccaggtacaagagacacctcaccaccctggccagtttacagaccagctttcgagcccagaaatttccctgtaggaaatttgtaaggaccactggctcatggggaggaaataaatcaataaaaggaaaaaaaaatgaataatactgtttttttaaagagagaatgcaatcatccttttcttaagaagacagaaagccaaggcattatatttaaataaaaatttaaataattgaatgattttaaaaga

SEQ ID NO: 537 - DNA, 401 bp, Homo sapiens; identical to SEQ ID NO: 100

SEQ ID NO: 538 - DNA, 431 bp, Homo sapiens
tttttttttttttttttttttttttttttttgctggagttagtttattaaagatgcctacggtgaactctctggcgcaggttaaatgcagttttgaaaacctggaaacatcaaatggaggcgggaaataggctggggcgacgttgaggggctgaacacagcagtgaccgtgggtcagcaggtcgcctgcccagcagctcctccaggagagggctcgggcgcccctggcagccgccatacccccaggacctggctcgtgagtgcgtctgggtcaggaagagacctctctgtgcgtctcaggctgagatgcagatttctgttttctaaaactggaagcgaccttgacgtgtattgaaggtgtgtgtgccaaatgcttccgacggaggtgctggccttggttggtttctctctgccccgtgtggtcatcaagtc

SEQ ID NO: 539 - DNA, 188 bp, Homo sapiens
gcaataaataaaacttttattcaaacaagtaactgcagtacagggcacaattcagattttttaaaaaaaaggaaaggaaacaggaaaaaaatatgttcagcactttacatcttcatacaagtgttgctgttttgtgtctacattcatccattgagcatggaatcccctggatttgaaatctttagcgg

SEQ ID NO: 540 - DNA, 346 bp, Homo sapiens
taacagtaggaaaaaccacactattaaagtataaaattttgtcaaggctctattttctaagcctatataaaggccaggtagtaaatattttgagctttgcggcccatgtgatctctactacgagtactcaaccctgctccagtaatatgaaagtagtcacagacaactggaaatgaatggatatggctgtatttcaataaaatattacttacaaaaatagcaggaccaacacttgctgacccctcactttcataggttttataaccttattaacttttaaaaggtagttctacaacctctcaaatgagaatgaaaatgaagacaaagctactttagtgttttaaag

SEQ ID NO: 541 - DNA, 384 bp, Homo sapiens; identical to SEQ ID NO: 104

SEQ ID NO: 542 - DNA, 183 bp, Homo sapiens
ttttattaaagcaatgacttattagagactactggtatatgaagctgcaatacacatggggatcaattcctccaatttcatgtttccttactatgtatgtatctctttttgttttttcattctggtaaccagagtacatatgacaggctgcattatttcaaatacctaacactgaaagttact

SEQ ID NO: 543 - DNA, 329 bp, Homo sapiens
tttttttttgcaacaggatccggtttattctgccttgggggtgggtcctgagagtggtgggtgccacctgttccggggcggaaagagggcccgaggaggttaaggcaatgggggagaagcagggggctgagcggcacatgcggtgaaccaggccgaggccggaggagctgtggtaggccagggagggtggaaggcaccggactgggaccggccagggctacagggcgaggaccaggcacacgggcaccccggaggcgggcacagggtcacgtgacacagaacatgaaacacaggcacagggtcataggccagatgcacatccagccatg

SEQ ID NO: 544 - DNA, 442 bp, Homo sapiens
tttttttttttttttttttttttttttttttaaattgaaaggaaacttttattgagtcatgttttcaaagcaatctagtttttaaaaaagttgaagacaagacagaaaaaagaacatgacacctaagagaatcagacaggacagacagacgggagcaggggggcggggacagcggctccgtggaggtcagatcttctccatcttggagatgaggtcgtcgcagatcctggtcagctcctcgttctctttagtcttctgctccactgtcttctccagcgactggatgcgcatctgctccttcctcaggctggcctggagggcaacgcttccgcctgggccttgctccggacctgggcgatctcctcgtttgccagctgcagcttctcctccgcgtgggccttcagggcttggtacctctggccctcctgggtgatccttgcca

SEQ ID NO: 545 - DNA, 526 bp, Homo sapiens
tttaagttgaaaactttcaccttttcatttaaaaggaagcactttgtggcttctctttggcatatccgaatcaccagcatcactactcctgctctctggggccactgttaagcaaagtgaggactgcttgggcacaggcactgtgatgctgggatagttgatctgatcaccaagacggctactaagtcactagcagggtgggtggcgtatacagcgtggatgtgctggaccaagggatgactcacatccccggccggctggagccgacagcgagagatttcatcacgctactcagaagggcacaccatttgagacttaaaattctttatttctggaattttccatttaatatttttgaactgcagttgactgcaggtaacaaactgtggaaagcgaaaccatagatacgagcgggctactgcgttcaaaaggctcttcaactgttgtggatcctctgatgttctcggagatggtttaggtggttacatgccttcccgcactccttacattcgtaggatttcggccc

SEQ ID NO: 546 - DNA, 375 bp, Homo sapiens
ttttttttttttttttttttttttttttttttttttccacagagtgaagtttattcccaacaaagttcccctcccccctccccagcccgggacagggacggacaggctgggctgaagatggggttccagtggctgaggggcctctgagaaacaaggaagggccctgggaccccaggccaagccatgtccggctcccccagcctggctgagtccacggcgcctccctgcccagccctcgggaaaggggagagggcgctggctcctgggtagttccaaagtggagtgtgaaaatagagagatatatatatttatatgcagtgggcagtccagcgtggcactcacacctctgtctggaagtcaccatccggtggttct

SEQ ID NO: 547 - DNA, 355 bp, Homo sapiens
agaacaaaatggttttaatcaattgcgtcaccctcactctcctgggagcggcaacgaaaaaggctcggctcctgcccccagaggacagtaaggcttatgtgtctctccacactgcagggcccaggctggcgaggcagggggtgggaagcaggacagggggcagggagggagggtgggaggcagggaggaaatggcaggtggctggaacacaagaaagcaaaggggacccagctggtccttgggccccagggcacgcccctaatactcctgctctcccttcaccctggctagagaaaggtcacggagaagagacaggggagcaggtcccagcagcaggagaagcagcagcagctgt

SEQ ID NO: 548 - DNA, 225 bp, Homo sapiens; identical to SEQ ID NO: 321

SEQ ID NO: 549 - DNA, 266 bp, Homo sapiens
gaatgtcattttattccaatgataagatacagattacaaaacttctagtataattacacataattaccttttgttgttttcctacaagaaatgcacaggtattttgaggtcttttgtattgcattattggtaaaacattgcatagtattagtttgtggctctgttacaatgggtaatgacaggaatgcatacagatgtctctgctatgataaaatgtgctcttgttgggttacattaaccttccttcaaaagggatttctcagttg

SEQ ID NO: 550 - DNA, 332 bp, Homo sapiens
ttttaatcagaaatatctgcgcacattgacaaatgtccaccggatgggaagaagaatgtggggtgtaaaattcccatttttgagacccacttgcttagaatgtattaaagacctataattgaaaataccttggcaaaatctcccaaaattgtctctcaaaataacagtatatacagtgtaacatacacaacatcctgttatactaatgaaaaaatctaagaaaaactctataggatgatatttagatattacagtcactatattaactattaggataatgtgccactaattcccaatcgtcactgctttcatgtagtgcttgctccatattg

SEQ ID NO: 551 - DNA, 433 bp, Homo sapiens
ttttaatatctgctactgactttggctttctgaagtttgctatctggcttaccagtagaaacccttagtcaattttggaattgtacaatttcaattgtacaattcttcgttacactctcaaatccacaagtcatttgtgctgaagtagaattggaaaaatgagaagcatatttctgcatctgagttctgctctacctgcaactccctacatgacctaagtaaccaattttctcatctatgaaacaagacaaacctgctgcaagggctttctgttacccctatgggagtggtgggtaatgctgacgccctatctgacactctcatcactgaaggtgtgtcatctgcatccttctccagccttctctagcttggcccattcagatgtcaatctggtacaagatctggctcttctagttttcttaagaattgatgc

SEQ ID NO: 552 - DNA, 258 bp, Homo sapiens
  misc_feature (1)...(258): n=a,t,g or c
gatcctgggctcataggcagtccctttcacttccttgtcttgctccctgctatgctggagatgaatgtgactaaaagggccatcttgctggcttaatgtgtggctggagagaccagcctggagacaatgtggcaaaatggggcgcttcatccagtctgtctaagccctgtcgacttggggaggtgatttctttcctggttctatatgtnaagcaaaataaatgttttaaaattaaaagcannaaagcagaatgtgagt

SEQ ID NO: 553 - DNA, 322 bp, Homo sapiens
  misc_feature (1)...(322): n=a,t,g or c
aattnnaaanacatggctgcatttattgttcccagcccggcgagaaggttttcccagaaaggttccttgggtcacctgcccacccagccttggtctgggctgccatgtccccacgggcaggagagaggcacaagtcacagtcaggcaagggagcctcagcttcctgggcggtggctnttggggtccctccagtnttcacctgggaccctcggccaggttgggacanattccagggaggcgaggttgcatggtccagcggtgggtgcaggtggcaacaggttcggcgggttttgcaggttccaaaaggagntttcgggttggg

SEQ ID NO: 554 - DNA, 503 bp, Homo sapiens
  misc_feature (1)...(503): n=a,t,g or c
ttttttttttttggtatcagtctctttattggatgtgagggccaaaagggactgtaactcctgtctcaggaatggggatagatgggaggttcttgaagccccaggcatantggnnacctctggctacagcttgctctctgagacctggggcttcactcggatcacgccctcctggnancaggtcacagctaggactccatcctgacgccacagccgcccatggaccagcccccgagagccaccggcccaggggctctcgcattcatagagcatccagtggtcagctcggaagggggcgtggaaccacatggaaatggtccagtgagaccatgaagtgcaccttgtctgnccactggtgaggcagcagtgcagtgcccaagaaggcatagttcggagatataggcggccacgagncagttgcatttttcatgttcgncttcgnttgcaacaggtccccttcagcctgggttcctggggtttncagttcaggaccattttagccn

SEQ ID NO: 555 - DNA, 419 bp, Homo sapiens; identical to SEQ ID NO: 332
  misc_feature (1)...(419): n=a,t,g or c

SEQ ID NO: 556 - DNA, 420 bp, Homo sapiens
acaaaataacacaatttattactattttgaaacaaatcacaaaataacattcagaaactcaacatttctaaataacttaattcacaataagtttagtcataaagtcatgctacaaaactcctgtgtataaaagattattaccaaggtattcatagatgttaaaatgttcttcagaatggagttggttctagaagccaaagattctggaatgatgcttgtaatcatgactgccagcctgggagaggagctggctatgcgcatgtgctcttagcttccaactcaccagtcttttgatgggagtgatccctccaggcagtagcacctcagaggcaggtaccctactgattcacagaggcaaagagcctcccacccatataatgttagacaactctacattcatttaaaatctagaggtgggaa

SEQ ID NO: 557 - DNA, 560 bp, Homo sapiens
  misc_feature (1)...(560): n=a,t,g or c
agtttcaatttttattatgaatgtccaaagtgacagcatactgtgaaaatgctaagttctcattgattaaatttcaagagaccacagactacagcattccaagcactttaatttttgacagagccaaaaacaaataaaagaatgataaaaatattcttttgggtgtaaagagtattcatatttgagtttttgtatttttttcttccctgcaggtattgtgaacactgataatttccaaaacataaattctggtctggatacttgcagcaaatttttataatctctacctggataagaagctaataagaaatgtacttataaagtatgtttaccgatacagtgtgatatgtttgtttatcttcatttcccctatctatcccatgaggcttcttgtctaccacccgggtacctggctggttgggtaataacaggacagggaggctgaagtgaaacactccgaagactggtacagaatccngggattttccggaaagcnggcatttacnccctttttttttaatggaaagccttaagaccttcagtggnttggggaacggtcc

SEQ ID NO: 558 - DNA, 435 bp, Homo sapiens
  misc_feature (1)...(435): n=a,t,g or c
ttttacatgagatattcaacattttattataaaacaggctttctgttagatgattttgctcaactttaggtgttctgagcatgtttaaggtaggctaggctaagccatgatgtttagtaggttaggggtattaagtgcattttcaaattaccatattttcaacttacaatagtttcaacgggaggtaaccccatcgtaagtggaggaacatctagtgcctggcacacgagccggttctcaataaatataactcttctccatcttcttcaaacctcaggccaggtttcagtgacctcctctcactttctaagattatttttgcttgctggtgggtttactgtcatttttaaccacatctaacctaccttaaaaaagtgtatggatgggggtgccaggtacaaagacttagcataangaaaacgaccatttactttg

SEQ ID NO: 559 - DNA, 374 bp, Homo sapiens
catgctggagtgcagtggtgtgatctcggctcactgcaacctctaactcctgggctcaagtgatctttccaaccacagcctctcaaagtagttggaaccatagacatgcaacaccatgattggctaatttttttgtagacacggtagtttttgtagacacagggtttcaccatgttgcccaggctggtctcaaactcctgggacttaagcagatccattcgccttggactcccaaagtgccgggactacaggtgtgagctaccacgcccagacgcattttctaaattcttgtgtatctataataattcaacttaattaaaactgttttgcactatggatacacaaaagggagggcccaacaggtggatttccct

SEQ ID NO: 560 - DNA, 337 bp, Homo sapiens
  misc_feature (1)...(337): n=a,t,g or c
tacanaaatatcctggcaggatctgaaactgtttctccaaatgtctaaaatatatctgtcacacaaaatgacccccaaagagaatcctgggaagaaaacaatttctcctcctccatcatccaattaagtatttattaaacagtcactatacttaaaatacctttccagggtaccacctactaaggttaacagactactgttcaaacaccgcaaaggaaaggcatggaactaggataggaaacaaggaaaaaccttcaatttttttttgttggcctttttgtttgtttttacatgagggaaaagggaaaccaaactgaggggggnaaaaaaataaggg

SEQ ID NO: 561 - DNA, 417 bp, Homo sapiens
  misc_feature (1)...(417): n=a,t,g or c
ccatctcagtctcccctgcctgctcattcctggggctccaggccaatgctcagcagcagagagtttataaataaataaattacaaaagcgggcagggagtggcctggccagccctcccgggnntantggctcagtgctcagtgagtgacagctgcaggatccgctgtaagtcctcctcctcctgctgcccgcgccgntcccgctcctcctgctcccgtgaaggacaactccaggggccagggcgcagtggcttctttcaaagctggggtgggaccggtgggctggggggtgtcctnggggagggggatcctnggggcccctggggatccttgtggggacaagcttncaggctttttctggggnaagggccccntttccagcttnaaagctnttttcctcaataaaccgtgggccttt

SEQ ID NO: 562 - DNA, 295 bp, Homo sapiens; identical to SEQ ID NO: 118
  misc_feature (1)...(295): n=a,t,g or c

SEQ ID NO: 563 - DNA, 299 bp, Homo sapiens
tttaccagttctcgattttatttaggactcaaattaacaccaaccaaacatatcactaactcacttattttcacattttcaaagttggattgtgctgcaaatccatacatttgtgctcactacacatttggggtattacattcattgagaggctccaaagcatcagtccaataaacatttttccagcccgataaccatccttggtaagaactaagaggtaaaatcattcacacaactattttttcccttctatccttagctcataagcatttgaccaaatgccaatgtttttgccagtt

SEQ ID NO: 564 - DNA, 404 bp, Homo sapiens; identical to SEQ ID NO: 121

SEQ ID NO: 565 - DNA, 346 bp, Homo sapiens
  misc_feature (1)...(346): n=a,t,g or c
gggagaaataaccagctattgttccgcattcaaacagaaattcaggtgcttgcatctttcacgtattgttcaaaaatcacaagcatctgtggaaaaaaactaaggtattacagacactacacggaggtcatgttcttacattcaagacactaaatacaaaccgangcantgcaaaattgtatactttaattttaaaacccantttttgttctcaacttgaaaagggnaacacttttttgtttcacaaacaagctgggtcgggttggganttctttttgggaacagtaggtcccgcgctaaacactgggttcttgcctccccacccccnttctctaaaatnaaccca

SEQ ID NO: 566 - DNA, 551 bp, Homo sapiens
  misc_feature (1)...(551): n=a,t,g or c
tggggcccaatggcgatgttaataaatacataaaattttaaagatctggatttccaaggcacaagagtttaacacaggccaggctggttctcacaggaatgactccacgtgtgccccagcatcccagggaggggagggcaacagggggagggcggggagccccanggacctccactctccaaaggggttgcaggccagggccnactactcatgttcctccaggctggctcagaacagcccctttgccttggggaaggaagaagtgagaagcacctctatcacctggcaggagtttaggagacatcctccaagaccccggaggtgtcctgggaccccctgccacttcctgagagccagaggatcttaagactnttacctgtccctttggaggtagcatggccggcagctgagcacagctcaggccctttacagcaccgtggggtgaagtgtgtcttccccactccagcaccaagccaagggnttggcaccctgccctggggnaatttggcctnggtggcccttgtcatttccaaggccaagctatgaatgga

SEQ ID NO: 567 - DNA, 1201 bp, Homo sapiens
agtcccagctcagagccgcaacctgcacagccatgcccgggcaagaactcaggacgctgaatggctctcagatgctcctggtgttgctggtgctctcgtggctgccgcatgggggcgccctgtctctggccgaggcgagccgcgcaagtttcccgggaccctcagagttgcacaccgaagactccagattccgagagttgcggaaacgctacgaggacctgctaaccaggctgcgggccaaccagagctgggaagattcgaacaccgacctcgtcccggcccctgcagtccggatactcacgccagaagtgcggctgggatccggcggccacctgcacctgcgtatctctcgggccgcccttcccgaggggctccccgaggcctcccgccttcaccgggctctgttccggctgtccccgacggcgtcaaggtcgtgggacgtgacacgacctctgcggcgtcagctcagccttgcaagaccccaggcgcccgcgctgcacctgcgactgtcgccgccgccgtcgcagtcggaccaactgctggcagaatcttcgtccgcacggccccagctggagttgcacttgcggccgcaagccgccagggggcgccgcagagcgcgtgcgcgcaacggggaccactgtccgctcgggcccgggcgttgctgccgtctgcacacggtccgcgcgtcgctggaagacctgggctgggccgattgggtgctgtcgccacgggaggtgcaagtgaccatgtgcatcggcgcgtgcccgagccagttccgggcggcaaacatgcacgcgcagatcaagacgagcctgcaccgcctgaagcccgacacggtgccagcgccctgctgcgtgcccgccagctacaatcccatggtgctcattcaaaagaccgacaccggggtgtcgctccagacctatgatgacttgttagccaaagactgccactgcatatgagcagtcctggtccttccactgtgcacctgcgcgggggaggcgacctcagttgtcctgccctgtggaatgggctcaaggttcctgagacacccgattcctgcccaaacagctgtatttatataagtctgttatttattattaatttattggggtgaccttcttggggactcgggggctggtctgatggaactgtgtatttatttaaaactctggtgataaaaataaagctgtctgaactgttc

SEQ ID NO: 568 - DNA, 3323 bp, Homo sapiens; identical to SEQ ID NO: 123

SEQ ID NO: 569 - DNA, 4792 bp, Homo sapiens; identical to SEQ ID NO: 132

SEQ ID NO: 570 - DNA, 2261 bp, Homo sapiens; identical to SEQ ID NO: 141

SEQ ID NO: 571 - DNA, 634 bp, Homo sapiens; identical to SEQ ID NO: 144

SEQ ID NO: 572 - DNA, 2533 bp, Homo sapiens
ggagctcaagctcctctacaaagaggtggacagagaagacagcagagaccatgggacccccctcagcccctccctgcagattgcatgtcccctggaaggaggtcctgctcacagcctcacttctaaccttctggaacccacccaccactgccaagctcactattgaatccacgccattcaatgtcgcagaggggaaggaggttcttctactcgcccacaacctgccccagaatcgtattggttacagctggtacaaaggcgaaagagtggatggcaacagtctaattgtaggatatgtaataggaactcaacaagctaccccagggcccgcatacagtggtcgagagacaatataccccaatgcatccctgctgatccagaacgtcacccagaatgacacaggattctataccctacaagtcataaagtcagatcttgtgaatgaagaagcaaccggacagttccatgtatacccggagctgcccaagccctccatctccagcaacaactccaaccccgtggaggacaaggatgctgtggccttcacctgtgaacctgaggttcagaacacaacctacctgtggtgggtaaatggtcagagcctcccggtcagtcccaggctgcagctgtccaatggcaacatgaccctcactctactcagcgtcaaaaggaacgatgcaggatcctatgaatgtgaaatacagaacccagcgagtgccaaccgcagtgacccagtcaccctgaatgtcctctatggcccagatgtccccaccatttccccctcaaaggccaattaccgtccaggggaaaatctgaacctctcctgccacgcagcctctaacccacctgcacagtactcttggtttatcaatgggacgttccagcaatccacacaagagctctttatccccaacatcactgtgaataatagcggatcctatatgtgccaagcccataactcagccactggcctcaataggaccacagtcacgatgatcacagtctctggaagtgctcctgtcctctcagctgtggccaccgtcggcatcacgattggagtgctggccagggtggctctgatatagcagccctggtgtattttcgatatttcaggaagactggcagattggaccagaccctgaattcttctagctcctccaatcccattttatcccatggaaccactaaaaacaaggtctgctctgctcctgaagccctatatgctggagatggacaactcaatgaaaatttaaagggaaaaccctcaggcctgaggtgtgtgccactcagagacttcacctaactagagacagtcaaactgcaaaccatggtgagaaattgacgacttcacactatggacagcttttcccaagatgtcaaaacaagactcctcatcatgataaggctcttacccccttttaatttgtccttgcttatgcctgcctctttcgcttggcaggatgatgctgtcattagtatttcacaagaagtagcttcagagggtaacttaacagagtgtcagatctatcttgtcaatcccaacgttttacataaaataagagatcctttagtgcacccagtgactgacattagcagcatctttaacacagccgtgtgttcaaatgtacagtggtccttttcagagttggacttctagactcacctgttctcactccctgttttaattcaacccagccatgcaatgccaaataatagaattgctccctaccagctgaacagggaggagtctgtgcagtttctgacacttgttgttgaacatggctaaatacaatgggtatcgctgagactaagttgtagaaattaacaaatgtgctgcttggttaaaatggctacactcatctgactcattctttattctattttagttggtttgtatcttgcctaaggtgcgtagtccaactcttggtattaccctcctaatagtcatactagtagtcatactccctggtgtagtgtattctctaaaagctttaaatgtctgcatgcagccagccatcaaatagtgaatggtctctctttggctggaattacaaaactcagagaaatgtgtcatcaggagaacatcataacccatgaaggataaaagccccaaatggtggtaactgataatagcactaatgctttaagatttggtcacactctcacctaggtgagcgcattgagccagtggtgctaaatgctacatactccaactgaaatgttaaggaagaagatagatccaattaaaaaaaattaaaaccaatttaaaaaaaaaaaagaacacaggagattccagtctacttgagttagcataatacagaagtcccctctactttaacttttacaaaaaagtaacctgaactaatctgatgttaaccaatgtatttatttctgtggttctgtttccttgttccaatttgacaaaacccactgttcttgtattgtattgcccagggggagctatcactgtacttgtagagtggtgctgctttaattcataaatcacaaataaaagccaattagctctataact

SEQ ID NO: 573 - DNA, 2427 bp, Homo sapiens
ggggcggccggcaaggggcgcgccgcagcggggccagaccccggaggccggcgcggacaagcgagccacggcgggcctctgcggcggcggcggcgggcggcggcgccaccgggcatccgggcggcgggcagggcgcggagaacctgccggcttgaagagccagggccaacgagctgttccgaagcgggcagttgcccgaggcggccggcagtactcggcggcaatcgcgctcctggagcccgcaggaagtgaaattgcagatgatctaagtattatattcaatagagcagcatgttacctaaaagaaggaaactgcagtggctgcattcaagattgtaacagggctctggaacttcatccattctctatgaaacctcttctgaggcgggcgatggcctatgaaactctagagcagtatgggaaagcttatgtggattataaaacagtgttgcagatagactgtggactccagctagcaaatgacagtgttaacaggctatcaagaattttaatggagctggatggaccaaattggcgggagaagctgtcacttattcctgctgtgcctgcttctgtgccactgcaagcttggcatccggcaaaagagatgatctcaaaacaagcaggagactccagcagccatcgccagcagggcatcacagatgaaaaaacatttaaagcccttaaggaagaaggaaatcaatgtgtaaatgacaaaaactataaagacgccctcagtaaatacagcgaatgcttaaagattaacaataaggaatgtgccatatatacaaacagagctctctgttacttgaagctgtgccagtttgaagaagcaaagcaggactgtgatcaggcacttcagctagctgatgggaacgtgaaagccttctatagacgagctctggctcataaaggactcaagaattatcagaaaagcttaattgatctcaataaagttatcctactagatccaagtattattgaggcaaagatggaactggaagaggtaactagactccttaatcttaaggataagacagcaccattcaacaaagaaaaggagagaaggaaaattgagattcaagaggtgaatgaaggcaaggaggagcctggaagacctgcaggggaggtctccacgggatgccttgcttctgagaagggaggcaaaagcagcaggtcaccagaagaccctgagaaacttccgatagccaagcctaataatgcctatgaatttggtcagattataaatgctctcagtaccaggaaggataaagaagcctgtgcacatcttttagccatcactgcaccaaaagatttgccgatgtttttaagtaacaaacttgaaggggatacattccttctcctcattcagtctctgaaaaataatcttattgaaaaagatccctcattggtgtatcagcatcttttatacctgagtaaagcagaaaggtttaagatgatgttgacactaattagcaagggccaaaaggagctaattgaacagctgtttgaggacctttcagacacaccaaacaaccattttactttagaagatatacaggccctaaaaaggcagtatgagctttaaatcaagataattgttagatttcttccatgcatgtatgtgttccaggaatgttaatgagatggtattgtaaaagagttgcatggataaaacttggcctagaaaagtttggtctgcactataaaacattttacttattttcctacatagaacatgtatattctacaatctgctttttattagttgtaaatattttcttatgtaccagaaccaaataagtatatttagaacttgttaaaaatacattttaatttatgatatacatattattttaattacttgttaaaattttgagttaagttgcatttctttgggctatgaaggagtcctcttaagtttgatagaaatgaatttcttgtaacattcttttttaaaagtggaagtcattaacagtgattattatatcacttatatcctgctaagatacacataaatcccattttgtactagtacctgtggattacagtcagttaaaatgaaatgcaacactgaagtctataacatgaaatgattattaaattgtttattaatttagagctataagaggaacttattttttctaatacggaagcattgcctaataattaagaacaaaaattgccaaaaatttctaccactttttactagattttaaaaagctactttcttttatattgcctatataagcaaaaaaccaaccactgtattaaagcaaactaagcctgcatttatatctgaattattacctccatattttaccaaacatttgaatgtcccccttcccccttttttgttttctgcttttatgactgtatttattcctttactgtaaaagaatatgaagaactcaaaaaaaaaaaaaa

SEQ ID NO: 574 - DNA, 3090 bp, Homo sapiens
gaattcaggggacccatgggaaaatttccaaaacaaccaggctctcacctactgggaatgtgtctatttactcatggtcacaatgtccaccgttggttatggggatgtttatgcaaaaaccacacttgggcgcctcttcatggtcttcttcatcctcgggggactggccatgtttgccagctacgtccctgaaatcatagagttaataggaaaccgcaagaaatacgggggctcctatagtgcggttagtggaagaaagcacattgtggtctgcggacacatcactctggagagtgtttccaacttcctgaaggactttctgcacaaggaccgggatgacgtcaatgtggagatcgtttttcttcacaacatctcccccaacctggagcttgaagctctgttcaaacgacattttactcaggtggaattttatcagggttccgtcctcaatccacatgatcttgcaagagtcaagatagagtcagcagatgcatgcctgatccttgccaacaagtactgcgctgacccggatgcggaggatgcctcgaatatcatgagagtaatctccataaagaactaccatccgaagataagaatcatcactcaaatgctgcagtatcacaacaaggcccatctgctaaacatcccgagctggaattggaaagaaggtgatgacgcaatctgcctcgcagagttgaagttgggcttcatagcccagagctgcctggctcaaggcctctccaccatgcttgccaacctcttctccatgaggtcattcataaagattgaggaagacacatggcagaaatactacttggaaggagtctcaaatgaaatgtacacagaatatctctccagtgccttcgtgggtctgtccttccctactgtttgtgagctgtgttttgtgaagctcaagctcctaatgatagccattgagtacaagtctgccaaccgagagagccgtatattaattaatcctggaaaccatcttaagatccaagaaggtactttaggatttttcatcgcaagtgatgccaaagaagttaaaagggcatttttttactgcaaggcctgtcatgatgacatcacagatcccaaaagaataaaaaaatgtggctgcaaacggctcaaggttgcagctagatcacgctattccaaagatccatttgagttcaagaaggagactcccaattctcggcttgtgaccgagccagttgaagatgagcagccgtcaacactatcaccaaaaaaaaagcaacggaatggaggcatgcggaactcacccaacacctcgcctaagctgatgaggcatgaccccttgttaattcctggcaatgatcagattgacaacatggactccaatgtgaagaagtacgactctactgggatgtttcactggtgtgcacccaaggagatagagaaagtcatcctgactcgaagtgaagctgccatgaccgtcctgagtggccatgtcgtggtctgcatctttggcgacgtcagctcagccctgatcggcctccggaacctggtgatgccgctccgtgccagcaactttcattaccatgagctcaagcacattgtgtttgtgggctctattgagtacctcaagcgggaatgggagacgcttcataacttccccaaagtgtccatattgcctggtacgccattaagtcgggctgatttaagggctgtcaacatcaacctctgtgacatgtgcgttatcctgtcagccaatcagaataatattgatgatacttcgctgcaggacaaggaatgcatcttggcgtcactcaacatcaaatctatgcagtttgatgacagcatcggagtcttgcaggctaattcccaagggttcacacctccaggaatggatagatcctctccagataacagcccagtgcacgggatgttacgtcaaccatccatcacaactggggtcaacatccccatcatcactgaactagtgaacgatactaatgttcagtttttggaccaagacgatgatgatgaccctgatacagaactgtacctcacgcagccctttgcctgtgggacagcatttgccgtcagtgtcctggactcactcatgagcgcgacgtacttcaatgacaatatcctcaccctgatacggaccctggtgaccggaggagccacgccggagctggaggctctgattgctgaggaaaacgcccttagaggtggctacagcaccccgcagacactggccaatagggaccgctgccgcgtggcccagttagctctgctcgatgggccatttgcggacttaggggatggtggttgttatggtgatctgttctgcaaagctctgaaaacatataatatgctttgttttggaatttaccggctgagagatgctcacctcagcacccccagtcagtgcacaaagaggtatgtcatcaccaacccgccctatgagtttgagctcgtgccgacggacctgatcttctgcttaatgcagtttgaccacaatgccggccagtcccgggccagcctgtcccattcctcccactcgtcgcagtcctccagcaagaagagctcctctgttcactccatcccatccacagcaaaccgacagaaccggcccaagtccagggagtcccgggacaaacagaagtacgtgcaggaagagcggctttgatatgtcttccttcacttcccccattgccaccccccaatcccagtacccccatcggtctgttcacatctctgtgttcatcttggcaagacctactcaatcaagtgatgatgccagttgataaacttccctggaaaacatttacagctattccatttggcaaacttgcttctctgtcaatatttcatcctcctttaaaccaggagggttattaatggcaaaagcattggtcttctttatgcttgatcagtatgactcaaattaaaagtgttctgctgtgtatatcaactcagtagcccacacccagttatctgggagctgatggttcagtcactgtattacccaaatctttcctgccagctgcctttcagacatttgttaaatcccaaccagagaccgggcagatagagagaagtaaatctgaagtgcgtttt

SEQ ID NO: 575 - DNA, 1161 bp, Homo sapiens
ggggggcggtgccgttgggaccacggcggccagagcggcaggatggcttccggcttcaagaagcccagcgctgcctccaccggccaaaagagaaaggtggcacctaagcccgagctcactgaggatcagaagcaagaagttcgggaagcatttgacctcttcgacgtggacggaagtgggaccatcgacgcgaaggagctgaaggtggccatgagagcgctgggcttcgaacccaggaaggaagagatgaagaaaatgatctccgaggtggacagggaaggcacggggaagatcagcttcaatgacttcctggccgtgatgacgcagaagatgtccgagaaggacaccaaagaagaaatcctgaaggccttcaggctctttgatgacgatgagaccgggaagatctcgttcaaaaacctgaagcgtgtggccaacgagctgggggagaacctcacggatgaggagctgcaggagatgatcgacgaagctgatcgggatggggacggcgaagtgaacgaggaggagttccttcggatcatgaagaagaccagcctttactgaagtcggttcagaagctaaagtgactctctgggttgcctgcttccattttgtgaaaccttagaggacagcggctgcctgtcccttcttcaccccctcacccccataatttgtctagatctatttccatatctctagttcaataatagaatttgaaagatgcttgtaatgtgagttttgggttttaattctcaagagccaacctggagcacatgaggttaaacaaagggccctgaagtttgagtgcgccctccatttgccctgtgctgaacttgctgttcatctgttgatctggaggcaggacagcttctgggacacacaaaaatgtggttccctttgtcacttctttggtggtcttaaattatcttgcttcatatatcattccttaaattccagtcattgttccagcataatgagatggaatctgccagtagatttgcctagcctgtccacttagctgaataccagtttgaaggaaaacagggtggccacttacaaacttacggagctcaggacagatattcttataaagaatagacttgcttgggtggtagtacgttgtgcaattttgactattcactggctttatacctgcaaatgccc

SEQ ID NO: 576 - DNA, 2040 bp, Homo sapiens
tgctctaaagcaaatgttatcactgagtcattgccatctgcagaatcagaacctgttgaaattgaggtagagattgccgaagccattgaagtggaagatgaaggcatcgaaacattagaggaagtggcttctgccaagcagtccgtaaagtacatacagagcacaggttcctctgatgattctgctctagcactgttggcagatattaccagcaagtaccgtcaaggtgacagaaaagggcagattaaagaagatggctgtccatctgaccccacgagcaaacaggtagaaggtattgaaattgtggaacttcagctgtcacatgtgaaggacttgttccattgtgagaaatgtaaccgttcatttaaattgttttaccattttaaggagcacatgaaatcacactccactgagagtttcaagtgtgaaatatgcaataaacgatatcttcgagagagcgcatggaaacagcacctaaattgttaccaccttgaagaaggtggagtcagtaagaagcaaagaactgggaaaaaaattcatgtatgtcagtactgtgagaaacagtttgaccattttggacattttaaagaacatcttcgaaaacatacaggtgaaaaaccttttgaatgtccaaattgtcatgaacgatttgctagaaatagcactctgaaatgtcacctcactgcatgccaaactggagtaggggcaaaaaaaggaaggaagaagctctacgaatgccaggtctgcaacagtgtgtttaacagctgggaccagttcaaagatcacttggtaatacacactggagataaacccaaccattgtactttatgtgatttgtggtttatgcaaggaaatgaattaaggaggcatctcagtgatgctcacaatatttcagagcgtctagtaacggaagaagttctttcagtagaaacacgtgtgcaaactgaacctgtaacatcaatgactattatagaacaagttgggaaggtgcatgtgctaccattgcttcaggttcaggtggattcagcacaagtgactgtggaacaagtccatccagatctgctccaggacagccaggtgcacgattcacacatgagtgagcttccagagcaggtccaagtgagttatctagaagtgggccgaattcagactgaagaaggtactgaagtacatgtagaggagctgcatgttgaacgggtcaatcaaatgccagtggaagtacaaactgaacttctagaagcagatttggaccacgtgaccccagaaatcatgaaccaagaggagagagagtctagccaagcagatgctgctgaggctgccagggaagatcacgaagatgctgaggatttagagaccaagccaacagtggattctgaagcagaaaaggcagagaatgaggacagaacagctctgccagttttagaatgaaattacacatgaatatatttttaaatttacttgttgggtttttgaactgattatgggcagtttgactgtccttaattaagcctaacagacaagtggaccaaagttaagctgtttcctgttgtgctgaactgttgtccgttgaaacacattgattcccctccccctacttattgccacagaggagggatcttttccataactgaaggggagttttgagaagtatatttctggaaacttaaatggattatattcttattatatagttgggtacgaatgtatctattttcattgtggtaaaagttcttccttttctctttcccaggtcatgttcttcctcaaattttttccatattgtaaaatcaaacttaaatcattagaatacaagtttatgtattctaatgcatgttagaaaattgaataatataggaaacacaaggctgcatgatgaaaagtgcattgttactgtgcagttaaattttggcttctggctttctttagtttgaacaaacgttcttgtctaccccagtagtcacagatgccatctttgcaacagaaagagtggtggtggcaaaatttctagaatgttctttagagcacactggggtaccggat

SEQ ID NO: 577 - DNA, 2635 bp, Homo sapiens
gaattcggcacgaggggtgctattgtgaggcggttgtagaagagtttcgtgagtgctcgcagctcatacctgtggctgtgtatccgtggccacagctggttggcgtcgccttgaaatcccaggccgtgaggagttagcgagccctgctcacactcggcgctctggttttcggtgggtgtgccctgcacctgcctcttcccccattctcattaataaaggtatccatggagaacactgaaaactcagtggattcaaaatccattaaaaatttggaaccaaagatcatacatggaagcgaatcaatggactctggaatatccctggacaacagttataaaatggattatcctgagatgggtttatgtataataattaataataagaattttcataaaagcactggaatgacatctcggtctggtacagatgtcgatgcagcaaacctcagggaaacattcagaaacttgaaatatgaagtcaggaataaaaatgatcttacacgtgaagaaattgtggaattgatgcgtgatgtttctaaagaagatcacagcaaaaggagcagttttgtttgtgtgcttctgagccatggtgaagaaggaataatttttggaacaaatggacctgttgacctgaaaaaaataacaaactttttcagaggggatcgttgtagaagtctaactggaaaacccaaacttttcattattcaggcctgccgtggtacagaactggactgtggcattgagacagacagtggtgttgatgatgacatggcgtgtcataaaataccagtggatgccgacttcttgtatgcatactccacagcacctggttattattcttggcgaaattcaaaggatggctcctggttcatccagtcgctttgtgccatgctgaaacagtatgccgacaagcttgaatttatgcacattcttacccgggttaaccgaaaggtggcaacagaatttgagtccttttcctttgacgctacttttcatgcaaagaaacagattccatgtattgtttccatgctcacaaaagaactctatttttatcactaaagaaatggttggttggtggttttttttagtttgtatgccaagtgagaagatggtatatttggtactgtatttccctctcattttgacctactctcatgctgcagagggtactttaagacatactccttccatcaaatagaaccactatgaagctacctcaaacttccagtcaggtagttgcaattgaattaaattaggaataaataaaaatggatactggtgcagtcattatgagaggcaatgattgttaatttacagctttcatgattagcaagttacagtgatgctgtgctatgaattttcaagtaattgtgaaaaagttaaacattgaagtaatgaatttttatgatattccccccacttaagactgtgtattctagttttgtcaaactgtagaaatgatgatgtggaagaacttaggcatctgtgggcatggtcaaaggctcaaacctttattttagaattgatatacacggatgacttaactgcattttagaccatttatctgggattatggttttgtgatgtttgtcctgaacacttttgttgtaaaaaaataataataataatgtttaatattgagaaagaaactaatattttatgtgagagaaagtgtgagcaaactaacttgacttttaaggctaaaacttaacattcatagaggggtggagttttaactgtaaggtgctacaatgcccctggatctaccagcataaatatcttctgatttgtccctatgcatatcagttgagcttcatataccagcaatatatctgaagagctattatataaaaaccccaaactgttgattattagccaggtaatgtgaataaattctataggaacatatgaaaatacaacttaaataataaacagtggaatataaggaaagcaataaatgaatgggctgagctgcctgtaacttgagagtagatggtttgagcctgagcagagacatgactcagcctgttccatgaaggcagagccatggaccacgcaggaagggcctacagcccatttctccatacgcactggtatgtgtggatgatgctgccagggcgccatcgccaagtaagaaagtgaagcaaatcagaaacttgtgaagtggaaatgttctaaaggtggtgaggcaataaaaatcatagtactctttgtagcaaaattcttaagtatgttattttctgttgaagtttacaatcaaaggaaaatagtaatgttttatactgtttactgaaagaaaaagacctatgagcacataggactctagacggcatccagccggaggccagagctgagcactcagcccgggaggcaggctccaggcctcagcaggtgcggagccgtcactgcaccaagtctcactggctgtcagtatgacatttcacgggagatttcttgttgctcaaaaaatgagctcgcatttgtcaatgacagtttcttttttcttactagacctgtaacttttgtaaatacacacagcatgtaatggtatcttaaagtgtgtttctatgtgacaattttgtacaaatttgttattttccatttttatttcaaaatatacattcaaacttaaaatt

SEQ ID NO: 578 - DNA, 1009 bp, Homo sapiens
tcagctcctccagcttccgccagcgaatgttggggaacctgcttcggcctccatatgaaaggccagagctccccacatgtctctatgtaattgggctgactggcatcagtggctctgggaagagctcaatagctcagcgactgaagggcctgggggcgtttgtcattgacagtgaccacctgggtcatcgggcctatgccccaggtggccctgcctaccagcctgtggtggaggcctttggaacagatattctccataaagatggcatcatcaacaggaaggtcctaggcagccgggtgtttgggaataagaagcagctgaagatactcacggacattatgtggccaattatcgcaaagctggcccgagaggagatggatcgggctgtggctgagggaaagcgtgtgtgtgtgattgatgccgctgtgttgcttgaagccggctggcagaacctggtccatgaggtgtggactgctgtcatcccagagactgaggctgtaagacgcattgtggagagggatggcctcagtgaagccgcggctcaaagccggctgcagagccagatgagcgggcagcagcttgtggaacagagccacgtggtgctcagcacttgtgggagccgcatatcacccaacgccaggtggagaaagcctgggccctcttgcagaagcgcattcccaagactcatcaggccctcgactgaaaggttctcagtggggccagactggctcctggagctgacaagcgaccccgtggtgaggagaaatgggggccttgatgctcaccctggttcaggcccagaggtccaagctatactgtgcaggacatggccaggcctggtggacacaggaagcctacccaacacgctggtatttggccaacactgaggatgtggttcatgggggagcagtcccctccccactcttgcccatgggtgactcttacccacagctgactagggccagcgcaaatactggaacctgtaacagaattaaaggtgaatgttctg

SEQ ID NO: 579 - DNA, 1896 bp, Homo sapiens; identical to SEQ ID NO: 369

SEQ ID NO: 580 - DNA, 3172 bp, Homo sapiens; identical to SEQ ID NO: 158

SEQ ID NO: 581 - DNA, 2200 bp, Homo sapiens; identical to SEQ ID NO: 160

SEQ ID NO: 582 - DNA, 1033 bp, Homo sapiens
ccactaaagtgcaagaattacattgcactgtttctccactttttattttctcttaggcttttgtttctatttcaaacatactttcttggttttctaatggagtatatagtttagtcatttcacagactctggcctcctctcctgaaatccttttggatggggaaagggaaggtggggagggtccgacagtggcggtagagaggagactccggctggcgaccggggactggtggagtggggtgatagccaagccatgggagacaagaagagccccaccaggccgaagcggcacgcgaagccttcctcggatgagggttactgggactgtagcgtctgcaccttccggaacagcgccgaggccttcaagtgcatgatgtgcgatgtgcggaagggcacctccacccggaaacctcgacctgtctcccagttggttgcacagcaggttactcagcagtttgtgcctcctacacagtcaaagaaagagaaaaaagataaagtagaaaaagaaaaaagtgaaaaggaaacaactagcaaaaagaatagccataagaaaaccaggccaagattgaaaaatgtggatcggagtagtgctcagcatttggaagttactgttggagatctgacagtcattattacagactttaaggagaaaacaaagtcaccgcctgcatctagtgctgcctctgcagatcaacacagtcaaagcggctctagctctgataacacagagagaggaatgtccaggtcatcttcacccagaggagaagcctcatcattgaatggagaatctcattaaagtttattttctccaatttcttagtcacttctgtcctaccatgcaaatacacagattatgccaagaggtaccacattttcatgacagatacattcatgcacaatccataatttgagttttacataaaatagaaatttgttagaatttgttagattttattgcaatgatgcctaccaaacatttccagacttaacattttggtctctgcagttaagtgccatgaaaatgtggttgaat

SEQ ID NO: 583 - DNA, 2738 bp, Homo sapiens; identical to SEQ ID NO: 371

SEQ ID NO: 584 - DNA, 1548 bp, Homo sapiens; identical to SEQ ID NO: 372

SEQ ID NO: 585 - DNA, 1952 bp, Homo sapiens
gtggaagagacctacttgcacattcttaacctgtatttgaacacaaaatatctatacttcatgctccagcccaagcctataccctgtaatagcatactattattgaaatcgcttgaccggtcttgttcacataggcctctgggagtgatttggttctttgccctaatgtttcatttgacggtctctttttgatcaaccaatttttctaaaagttcagtcgaaagcttttaagtatagcttcctcccttgaaaaaaaatgtaaactatgactgctgagtgataaaacactgtggtgtgaaagtgtcatcttcactgccaatcaggcaaagaccggaaagatttgcattttattatgtctgtcttatcatgcaatggaaatgatgctttttgtaagtatgcatcttaccaatgatgtaatggtttaatacctttgaatgttttaataaccaagttgctgctgaacttatactaaatcaggggaccaaaaaacttgctcttatcttctcaaattgtattctatatccattaatgtatcagttatcccaaagccttcaggtggaggggtttaccaccttcctaggtcgttcaaccaggttttgtgaggaatgcattcaaagtggctttataaaagaagattttctttagcaagaataatgaggtcatgtcatttgttaataagtatctgtgataaatccgtggttcaaggttaagccattctggtattctggtattagcaactgtaaattctgccacctcatacatggaacagagcttgtgggatgctaatagttagtgaagtatacatgatttaatttctaataatctttatgttttctttaaggatggtggtgtattgctctttttcagctttatttttaagagtacagtcaggaaaccaacaaggggcctaagagtggctgcccctgcttgggacattacagcaagtgaaacaaagttaatgtgacaagctttgctttgttatcattggtcttcactagaggataccttttacatgtacttctctcttggatcaaatatgtctttaactgtacatctcagtggctggaggccatgccttttaagcatgtgtaaaatttttaaagaaatgaacatacacatagttattttagtaatatttcctgaaagaaaaaccaaattctgctataagtcttgatcttcaatgaacttttaaataatgcatttagctggaaaacaagactttctcagcttgtattacctagaagcgtgaatgtataggatacctgactactaagactatattctcagccctgccctgtcttttatttgcgggtctaatctaatattagaatatattaaccgcttaaggcattgaagccatatgggatggggaatgcatttcttcagtgtttctccgagagactttccatttccttggagttatggcggcaagtaagtatcatagtattaagaaatttgcctaaatctgagttgtgcctttctttactcacaaggcatgggctttgtcctggtgatcagtttgtaagccttcttccttcccagctccttaataaaagcaaagtgattgagtaggtaatgttcaaagtgtctgcctgtgtacatgtacttgtattgattatgtagttcagtaagatgtgcccaagtcatttcagaaagaaagacccttcagttttgatgcattttgctgaacacttgggtagtgagtgggatcctatccagttgaggaatgcttgcaatgctcattgaagggatttgctttgggactttgtcatcttccagaaaggaaacatattgtatatttggcccagtgtgattgattgctttatctttggtaacttttacttgaatgggatttgctgaattaatgactattgaatttaaaactaattatgagttgacaaataaataaaaggtagtgtttatgtctgaaaaaaaaaaaaaaaaaaaaaaaa

SEQ ID NO: 586 - DNA, 4739 bp, Homo sapiens
ggggagataggtaggagtagcgtggtaagggcgatgagtgtgggccgggcgggagtgcggcgagagccggctggctgagcttagcgtccgaggaggcggcggcggcggcggcggcagcggcggcggcggggctgtggggcggtgcggaagcgagaggcgaggagcgcgcgggccgtggccagagtctggcggcggcctggcggagcggagagcagcgcccgcgcctcgccgtgcggaggagccccgcacacaatagcggcgcgcgcagcccgcgcccttccccccggcgcgccccgccccgcgcgccgagcgccccgctccgcctcacctgccaccagggagtgggcgggcattgttcgccgccgccgccgccgcgcggggccatgggggccgcccggcgcccggggccgggcctggcgaggccgccgcgccgccgctgagacgggccccgcgcgcagcccggcggcgcaggtaaggccggccgcgccatggtggacccggtgggcttcgcggaggcgtggaaggcgcagttcccggactcagagcccccgcgcatggagctgcgctcagtgggcgacatcgagcaggagctggagcgctgcaaggcctccattcggcgcctggagcaggaggtgaaccaggagcgcttccgcatgatctacctgcagacgttgctggccaaggaaaagaagagctatgaccggcagcgatggggcttccggcgcgcggcgcaggcccccgacggcgcctccgagccccgagcgtccgcgtcgcgcccgcagccagcgcccgccgacggagccgacccgccgcccgccgaggagcccgaggcccggcccgacggcgagggttctccgggtaaggccaggcccgggaccgcccgcaggcccggggcagccgcgtcgggggaacgggacgaccggggaccccccgccagcgtggcggcgctcaggtccaacttcgagcggatccgcaagggccatggccagcccggggcggacgccgagaagcccttctacgtgaacgtcgagtttcaccacgagcgcggcctggtgaaggtcaacgacaaagaggtgtcggaccgcatcagctccctgggcagccaggccatgcagatggagcgcaaaaagtcccagcacggcgcgggctcgagcgtgggggatgcatccaggcccccttaccggggacgctcctcggagagcagctgcggcgtcgacggcgactacgaggacgccgagttgaacccccgcttcctgaaggacaacctgatcgacgccaatggcggtagcaggcccccttggccgcccctggagtaccagccctaccagagcatctacgtcgggggcatgatggaaggggagggcaagggcccgctcctgcgcagccagagcacctctgagcaggagaagcgccttacctggccccgcaggtcctactccccccggagttttgaggattgcggaggcggctataccccggactgcagctccaatgagaacctcacctccagcgaggaggacttctcctctggccagtccagccgcgtgtccccaagccccaccacctaccgcatgttccgggacaaaagccgctctccctcgcagaactcgcaacagtccttcgacagcagcagtccccccacgccgcagtgccataagcggcaccggcactgcccggttgtcgtgtccgaggccaccatcgtgggcgtccgcaagaccgggcagatctggcccaacgatggcgagggcgccttccatggagacgcagatggctcgttcggaacaccacctggatacggctgcgctgcagaccgggcagaggagcagcgccggcaccaagatgggctgccctacattgatgactcgccctcctcatcgccccacctcagcagcaagggcaggggcagccgggatgcgctggtctcgggagccctggagtccactaaagcgagtgagctggacttggaaaagggcttggagatgagaaaatgggtcctgtcgggaatcctggctagcgaggagacttacctgagccacctggaggcactgctgctgcccatgaagcctttgaaagccgctgccaccacctctcagccggtgctgacgagtcagcagatcgagaccatcttcttcaaagtgcctgagctctacgagatccacaaggagttctatgatgggctcttcccccgcgtgcagcagtggagccaccagcagcgggtgggcgacctcttccagaagctggccagccagctgggtgtgtaccgggccttcgtggacaactacggagttgccatggaaatggctgagaagtgctgtcaggccaatgctcagtttgcagaaatctccgagaacctgagagccagaagcaacaaagatgccaaggatccaacgaccaagaactctctggaaactctgctctacaagcctgtggaccgtgtgacgaggagcacgctggtcctccatgacttgctgaagcacactcctgccagccaccctgaccaccccttgctgcaggacgccctccgcatctcacagaacttcctgtccagcatcaatgaggagatcacaccccgacggcagtccatgacggtgaagaagggagagcaccggcagctgctgaaggacagcttcatggtggagctggtggagggggcccgcaagctgcgccacgtcttcctgttcaccgagctgcttctctgcaccaagctcaagaagcagagcggaggcaaaacgcagcagtatgactgcaaatggtacattccgctcacggatctcagcttccagatggtggatgaactggaggcagtgcccaacatccccctggtgcccgatgaggagctggacgctttgaagatcaagatctcccagatcaagagtgacatccagagagagaagagggcgaacaagggcagcaaggctacggagaggctgaagaagaagctgtcggagcaggagtcactgctgctgcttatgtctcccagcatggccttcagggtgcacagccgcaacggcaagagttacacgttcctgatctcctctgactatgagcgtgcagagtggagggagaacatccgggagcagcagaagaagtgtttcagaagcttctccctgacatccgtggagctgcagatgctgaccaactcgtgtgtgaaactccagactgtccacagcattccgctgaccatcaataaggaagatgatgagtctccggggctctatgggtttctgaatgtcatcgtccactcagccactggatttaagcagagttcaaatctgtactgcaccctggaggtggattcctttgggtattttgtgaataaagcaaagacgcgcgtctacagggacacagctgagccaaactggaacgaggaatttgagatagagctggagggctcccagaccctgaggatactgtgctatgaaaagtgttacaacaagacgaagatccccaaggaggacggcgagagcacggacagactcatggggaagggccaggtccagctggacccgcaggccctgcaggacagagactggcagcgcaccgtcatcgccatgaatgggatcgaagtaaagctctcggtcaagttcaacagcagggagttcagcttgaagaggatgccgtcccgaaaacagacaggggtcttcggagtcaagattgctgtggtcaccaagagagagaggtccaaggtgccctacatcgtgcgccagtgcgtggaggagatcgagcgccgaggcatggaggaggtgggcatctaccgcgtgtccggtgtggccacggacatccaggcactgaaggcagccttcgacgtcaataacaaggatgtgtcggtgatgatgagcgagatggacgtgaacgccatcgcaggcacgctgaagctgtacttccgtgagctgcccgagcccctcttcactgacgagttctaccccaacttcgcagagggcatcgctctttcagacccggttgcaaaggagagctgcatgctcaacctgctgctgtccctgccggaggccaacctgctcaccttccttttccttctggaccacctgaaaagggtggcagagaaggaggcagtcaataagatgtccctgcacaacctcgccacggtctttggccccacgctgctccggccctccgagaaggagagcaagctccctgccaaccccagccagcctatcaccatgactgacagctggtccttggaggtcatgtcccaggtccaggtgctgctgtacttcctgcagctggaggccatccctgccccggacagcaagagacagagcatcctgttctccaccgaagtctaaaggtcccagtccatctcctggaggcagacagatggcctggaaacctctggctaatcgggccatccgtagagcgggaaccttcctgaggtgtccttgggccacccccaagtgttgggccatctgccaagagacagcgacccaaagccgaaggacaggtggcctgggcagatctcgcccaggtctgggagccccaggctggcctcagactgtggttttttatgtggccacccgagggcgccccaagccagttcatctcagagtccaggcctgaccctgggagacagggtgaagggagtgatttttatgaacttaacttagagtctaaaagatttctactggatcacttgtcaagatgcgccctctctggggagaagggaacgtgaccggattccctcactgttgtatcttgaataaacgctgctgcttcatcctgtg

SEQ ID NO: 587 - DNA, 490 bp, Homo sapiens
atccctgactcggggtcgcctttggagcagagaggaggcaatggccaccatggagaacaaggtgatctgcgccctggtcctggtgtccatgctggccctcggcaccctggccgaggcccagacagagacgtgtacagtggccccccgtgaaagacagaattgtggttttcctggtgtcacgccctcccagtgtgcaaataagggctgctgtttcgacgacaccgttcgtggggtcccctggtgcttctatcctaataccatcgacgtccctccagaagaggagtgtgaattttagacacttctgcagggatctgcctgcatcctgacgcggtgccgtccccagcacggtgattagtcccagagctcggctgccacctccaccggacacctcagacacgcttctgcagctgtgcctcggctcacaacacagattgactgctctgactttgactactcaaaattggcctaaaaattaaaagagatcgatatt

SEQ ID NO: 588 - DNA, 2161 bp, Homo sapiens; identical to SEQ ID NO: 169

SEQ ID NO: 589 - DNA, 2824 bp, Homo sapiens; identical to SEQ ID NO: 170

SEQ ID NO: 590 - DNA, 2545 bp, Homo sapiens; identical to SEQ ID NO: 174

SEQ ID NO: 591 - DNA, 2930 bp, Homo sapiens
gaattccggtttcttcctaaaaaatgtctgatggccgctttctcggtcggcaccgccatgaatgccagcagttactctgcagagatgacggagcccaagtcggtgtgtgtctcggtggatgaggtggtgtccagcaacatggaggccactgagacggacctgctgaatggacatctgaaaaaagtagataataacctcacggaagcccagcgcttctcctccttgcctcggagggcagctgtgaacattgaattcagggacctttcctattcggttcctgaaggaccctggtggaggaagaaaggatacaagaccctcctgaaaggaatttccgggaagttcaatagtggtgagttggtggccattatgggtccttccggggccgggaagtccacgctgatgaacatcctggctggatacagggagacgggcatgaagggggccgtcctcatcaacggcctgccccgggacctgcgctgcttccggaaggtgtcctgctacatcatgcaggatgacatgctgctgccgcatctcactgtgcaggaggccatgatggtgtcggcacatctgaagcttcaggagaaggatgaaggcagaagggaaatggtcaaggagatactgacagcgctgggcttgctgtcttgcgccaacacgcggaccgggagcctgtcaggtggtcagcgcaagcgcctggccatcgcgctggagctggtgaacaaccctccagtcatgttcttcgatgagcccaccagcggcctggacagcgcctcctgcttccaggtggtctcgctgatgaaagggctcgctcaagggggtcgctccatcatttgcaccatccaccagcccagcgccaaactcttcgagctgttcgaccagctttacgtcctgagtcaaggacaatgtgtgtaccggggaaaagtctgcaatcttgtgccatatttgagggatttgggtctgaactgcccaacctaccacaacccagcagattttgtcatggaggttgcatccggcgagtacggtgatcagaacagtcggctggtgagagcggttcgggagggcatgtgtgactcagaccacaagagagacctcgggggtgatgccgaggtgaacccttttctttggcaccgcccctctgaagaggtaaagcagacaaaacgattaaaggggttgagaaaggactcctcgtccatggaaggctgccacagcttctctgccagctgcctcacgcagttctgcatcctcttcaagaggaccttcctcagcatcatgagggactcggtcctgacacacctgcgcatcacctcgcacattgggatcggcctcctcattggcctgctgtacttggggatcgggaacgaaaccaagaaggtcttgagcaactccggcttcctcttcttctccatgctgttcctcatgttcgcggccctcatgcctactgttctgacatttcccctggagatgggagtctttcttcgggaacacctgaactactggtacagcctgaaggcctactacctggccaagaccatggcagacgtgccctttcagatcatgttcccagtggcctactgcagcatcgtgtactggatgacgtcgcagccgtccgacgccgtgcgctttgtgctgtttgccgcgctgggcaccatgacctccctggtggcacagtccctgggcctgctgatcggagccgcctccacgtccctgcaggtggccactttcgtgggcccagtgacagccatcccggtgctcctgttctcggggttcttcgtcagcttcgacaccatccccacgtacctacagtggatgtcctacatctcctatgtcaggtatgggttcgaaggggtcatcctctccatctatggcttagaccgggaagatctgcactgtgacatcgacgagacgtgccacttccagaagtcggaggccatcctgcgggagctggacgtggaaaatgccaagctgtacctggacttcatcgtactcgggattttcttcatctccctccgcctcattgcctatttggtcctcaggtacaaaatccgggcagagaggtaaaacacctgaatgccaggaaacaggaagattagacactgtggccgagggcacgtctagaatcgaggaggcaagcctgtgcccgaccgacgacacagagactcttctgatccaacccctagaaccgcgttgggtttgtgggtgtctcgtgctcagccactctgcccagctgggttggatcttctctccattcccctttctagctttaactaggaagatgtaggcagattggtggttttttttttttttttaacatacagaattttaaataccacaactggggcagaatttaaagctgcaacacagctggtgatgagaggcttcctcagtccagtcgctccttagcaccaggcaccgtgggtcctggatggggaactgcaagcagcctctcagctgatggctgcacagtcagatgtctggtggcagagagtccgagcatggagcgattccattttatgactgttgtttttcacattttcatctttctaaggtgtgtctcttttccaatgagaagtcatttttgcaagccaaaagtcgatcaatcgcattcattttaagaaattatacctttttagtacttgctgaagaatgattcagggtaaatcacatactttgtttagagaggcgaggggtttaacccgagtcacccagctggtctcatacatagacagcacttgtgaaggattgaatgcaggttccaggtggagggaagacgtggacaccatctccactgagccatgcagacatttttaaaagctatacacaaaattgtgagaagacattggccaactctttcaaagtctttctttttccacgtgcttcttattttaagcgaaatatattgtttgtttcttcctaaaaaaaaaaaaaaaaaaaaa

SEQ ID NO: 592 - DNA, 1378 bp, Homo sapiens
ggtagcagcatccaccgggcgggaggtcggaggcagcaaggccttaaaggctactgagtgcgccggccgttccgtgtccagaacctcccctactcctccgccttctcttccttggccgcccaccgccaagttccgactccggttttcgcctttgcaaagcctaaggaggaggttaggaacagccgcgcccccctccctgcggccgccgccccctgcctctcggctctgctccctgccgcgtgcgcctgggccgtgcgccccggcaggcgccagccatgtcgatgctgccgtcgtttggctttacgcaggagcaagtggcgtgcgtgtgcgaggttctgcagcaaggcggaaacctggagcgcctgggcaggttcctgtggtcactgcccgcctgcgaccacctgcacaagaacgagagcgtactcaaggccaaggcggtggtcgccttccaccgcggcaacttccgtgagctctacaagatcctggagagccaccagttctcgcctcacaaccaccccaaactgcagcaactgtggctgaaggcgcattacgtggaggccgagaagctgcgcggccgacccctgggcgccgtgggcaaatatcgggtgcgccgaaaatttccactgccgcgcaccatctgggacggcgaggagaccagctactgcttcaaggagaagtcgaggggtgtcctgcgggagtggtacgcgcacaatccctacccatcgccgcgtgagaagcgggagctggccgaggccaccggcctcaccaccacccaggtcagcaactggtttaagaaccggaggcaaagagaccgggccgcggaggccaaggaaagggagaacaccgaaaacaataactcctcctccaacaagcagaaccaactctctcctctggaagggggcaagccgctcatgtccagctcagaagaggaattctcacctccccaaagtccagaccagaactcggtccttctgctgcagggcaatatgggccacgccaggagctcaaactattctctcccgggcttaacagcctcgcagcccagtcacggcctgcagacccaccagcatcagctccaagactctctgctcggccccctcacctccagtctggtggacttggggtcctaagtggggagggactggggcctcgaagggattcctggagcagcaaccactgcagcgactagggacacttgtaaatagaaatcaggaacatttttgcagcttgtttctggagttgtttgcgcataaaggaatggtggactttcacaaatatctttttaaaaatcaaaaccaacagcgatctcaagcttaatctcctcttctctccaactctttccacttttgcattttccttcccaatgcagagatcaggg

SEQ ID NO: 593 - DNA, 2457 bp, Homo sapiens; identical to SEQ ID NO: 177

SEQ ID NO: 594 - DNA, 1882 bp, Homo sapiens; identical to SEQ ID NO: 178

SEQ ID NO: 595 - DNA, 322 bp, Homo sapiens
aaatatcatatggaaaggcataagagaacccatagtggagaaaaaccttaccagtgtgaatactgtttacagtattttccagaacagatcgtgtattgaaacataaacgtatgtgccatgaaaatcatgacaaaaaactaaatagatgtgccatcaaaggtggccttctgacatctgaggaagattctggcttttctacatcaccaaaagacaactcactgccaaaaaagaaaaggcagaaaacggagaaaaaatcatctggaatggacaaagagagtgctttggacaaatctgacctgaaaaaaaaaaaaaaaaactttag

SEQ ID NO: 596 - DNA, 860 bp, Homo sapiens; identical to SEQ ID NO: 184

SEQ ID NO: 597 - DNA, 2620 bp, Homo sapiens
ggcgggccttgggaaccgtctcctggttgtggggtgggggggaaagatggcggagctgatgctgctcagcgagattgctgacccgacgcgtttcttcaccgacaacctgcttagcccggaggactgggacagcaccttgtattctggcctagatgaagtggccgaggagcagacgcagctcttccgttgcccggagcaggatgtcccgtttgacggcagctccctggacgtggggatggatgtcagcccctctgagcccccatgggaactcctgccgatcttcccagatcttcaggtgaagtctgagccatcttccccctgctcttcctcctccctcagctccgagtcatcgcgtctctccacagagccatccagcgaggctcttggggtaggggaggtgctccatgtgaagacagagtccttggcacccccactgtgtctcctgggagatgacccaacatcctcatttgaaaccgtccagatcaacgttatccccacctctgatgattcctcagatgtccagaccaagatagaacctgtctctccatgttcttccgtcaactctgaggcctccctgctctcagccgactcctccagccaggcttttataggagaggaggtcctggaagtgaagacagagtccctgtccccttcaggatgcctcctgtgggatgtcccagccccctcacttggagctgtccagatcagcatgggcccatcccttgatggctcctcaggcaaagccctgcccacccggaagccgccactgcagcccaaacctgtagtgctaaccactgtcccaatgccatccagagctgtgcctcccagcaccacagtccttctgcagtccctcgtccagccacccccagtgtccccagttgtcctcatccagggtgctattcgagtccagcctgaagggccggctccctctctaccacggcctgagaggaagagcatcgttcccgctcctatgcctggaaactcctgcccgcctgaagtggatgcaaagctgctgaagcggcagcagcgaatgatcaagaaccgggagtcagcctgccagtcccggagaaagaagaaagagtatctgcagggactggaggctcggctgcaagcagtactggctgacaaccagcagctccgccgagagaatgctgccctccggcggcggctggaggccctgctggctgaaaacagcgagctcaagttagggtctggaaacaggaaggtggtctgcatcatggtcttccttctcttcattgccttcaactttggacctgtcagcatcagtgagcctccttcagctcccatctctcctcggatgaacaagggggagcctcaaccccggagacacttgctggggttctcagagcaagagccagttcagggagttgaacctctccaggggtcctcccagggccctaaggagccccagcccagccccacagaccagcccagtttcagcaacctgacagccttccctgggggcgccaaggagctactactaagagacctagaccagctcttcctctcctctgattgccggcacttcaaccgcactgagtccctgaggcttgctgacgagttgagtggctgggtccagcgccaccagagaggccggaggaagatccctcagagggcccaggagagacagaagtctcagccacggaagaagtcacctccagttaaggcagtccccatccaaccccctggacccccagaaagggattctgtgggccagctgcaactatatcgccacccagaccgttcgcagccagcattcttggatgcaattgaccgacgggaagacacattttatgttgtctctttccgaaggggccacctgctgctcccagccatcagccacaacaagacctcccggcccaagatgtccctggtgatgcctgccatggcccccaatgagaccctgtcaggccgtggggccccgggggactatgaggagatgatgcagatcgagtgtgaggtcatggacaccagggtgattcacatcaagacctccacagtgcccccctcgctccgaaaacagccatccccaaccccaggcaatgccacaggtggccccttgccagtctctgcagccagccaggcccaccaggcctcccaccagcccctctacctcaatcatccctgacctctgccattcacactgacttagaacggggggagggggtaccaggtggccaggtgggactgtttcaaatttccctgatccccaggcttggggcaattggtaaaggaaagagcaggtgtgggggttaagcacttatttgaggtgggggtgttcacctctcttctcatccctttatcagaatatagggctcctctcattcctgtgaacccccagtcctggcttctttgtttgaggggattgtgtgaggttcagttgtggggtgggtggtgagctgctgcatattttttattgtgtttctctagtgttatggcagtggaggtgggaatttagtccccaggtgggacaagggaagttttttcattttggagctagttactgggagtaagggagggtggggtgggggggagttcaggtttatgtgtgtgcatttcttttttattattactaaataaacaacttggagggagttga

SEQ ID NO: 598 - DNA, 455 bp, Homo sapiens
  misc_feature (1)...(455): n=a,t,g or c
acaccatgagcttcaataccctgtagagatacttcattcttctatttggtttatttagaaatcacctattctgactgatctttaagaatgaatgctataaagagctaccaaattttctttcaaattcataaaactgttcacacttttttgaaacaggagttaatgccgagaatccatcagaagtatctactgtttagaaggaaatggagcagcaccaaatgggtctaattcgactggttgggactgttgggactgatgtggagtgatgctttgcaccacaagttctataaagggcacggcaccaaaatcatccattttcaatacatctgcactatggaatgacccatgtagtgaattttgtcttggcccgccctggcaggaccagtattgtgatcagcacggatgtcgctncaggccctgatggtggagggtgccatgacagggtctggagaatg

SEQ ID NO: 599 - DNA, 448 bp, Homo sapiens
  misc_feature (1)...(448): n=a,t,g or c
aagaagtggcccctctgcaacatgtcctcacagaaacgaaatggtgtgtagcaatcaacactagaaagtagaccttttgcaaattaatatgtccttgaccttttttgcccttttgtgggggtgaggtggggataaaaagactgtcatatcaagaactgtgacttttctttccctcaaacaatanaactcctttattatcttaatgctcccatgttaacatgtttgctgctaaattacaatgtagaattgataatggtttatagtgaactgtgctcttccctcattaaaatcccagggtgccctggtaaagatgcagatgtttcttcctgaaaacttctttttttacaaagaaaattagatgtacatgtataattcagtgtgctttgtctttctccagattaatatcggttacactgctgatgtttgtanattanacagatatttactt

SEQ ID NO: 600 - DNA, 567 bp, Homo sapiens
  misc_feature (1)...(567): n=a,t,g or c
agagaagaccgtggatcacctggggacagaggtgaaaggcctgctgggctgctggaggagctggcctggaacctgcccccgggacccttcagccccgctcccgaccttctcggagatggcttctgagccctggagctggagcccagcagttggaggtggtgcacctgccaggcagcgccacagaaccagccctgtcctctcgacttccttccttagcttcatgtgaaataaaagctattctggtctcctctgtgtctgctgacagagtaacccgtttaactacagcctcctctcactccacttccatgcctggaggaagcctgcaaccccctccaggctcagacctggggacacccccantcctgtcatttataggggaagatggagcaggggttgattcacacagatggggggccctctgaattggcctgcttctcagaatgttggccataggtnaaaagcaaggggatcggggttcaggaccancagaatgtttagtgaatctgnatgaatgagaccccaggatttatgtgtccattaagtggttgttgtgntttaaaaaaaaaa

SEQ ID NO: 601 - DNA, 283 bp, Homo sapiens
cccagtactggtagacggagaagagcacgtcggttttccttaagacagatgggagttttgtggttcatgatataccttctggatcttatgtagtggaagttgtatctccagcttacagatttgatccgttcgagtggatatcacttcgaaaggaaaatgagagcagatatgtgaattacatcaaacatcagaggttgtcagactgccctatcctctcaaatgaatcttcaggtcacctcttacttattaaagggaatcgtgggctgacagcttctatgaccga

SEQ ID NO: 602 - DNA, 263 bp, Homo sapiens
gttcagtgctcatacgtatctgctcattttgacaaagtgcctcatgcaaccgggccctctctctgcggcagagtccttagtggaggggtttacctggaacattagtagttaccacagaatacggaagagcaggtgactgtgctgtgcagctctctaaatgggagttctcaggtaggaggcaacaccttcagaaagagctcaaaataaattggaaatgtgaatcgcagctgtgggtgtgaccaccgcctgtgtagagtcccagg

SEQ ID NO: 603 - DNA, 308 bp, Homo sapiens
gagcagcttgttgagacctgtcgattgttacgacacatatctgggacagaaacctctggaaataacctcctatacatgcagaggagacattttcaggtgactggccaacagataatttctgctgctgaaacattgacattgcatccatctagtaaaattgctaaagaaaacctagatgtattttgtgaagcttgggaatcccaaattagtgacatgtcaacactgctgagagaaatcaatgacgtgtttgaaggaagacgaggagagaagtatggcaccttcacttccaagcaattaggatatgcaac

SEQ ID NO: 604 - DNA, 182 bp, Homo sapiens
cctcggttggcacggtgcgtcttgattaattagttactctgactctggtctgccgagatccatttccaacccagttgcgttgggagagggttgggaggcagcagagcatgggtgacagtgggagcacacgacttccttggagcctgggcctttgcgggtcccaggtggtcaggcagctggag

SEQ ID NO: 605 - DNA, 450 bp, Homo sapiens
cagaactcagactaaccttgtggtttcaacgcgcactctgctctgtcctgaaatctggaactcattacctcatcaccaagaaactgcacgaaatctctcccccaccgccccaacacccactcgggaaaggaacgagcaaacatccctctaagaaagaaacctacacttgaatgatttaaattaaggtggatggaagttatttccctttctggcgcttgcagatttcaagaaaagctgaaaaatgggagcgggggagggaagcaacagacggctggagggcagcagcagaacaagcgaggggcagcaccgagttaaagtgggggccatccatttcgggcagaggagacaaatgaaagccgaccccgctgggatcacgtaggttcgtggctgcagcaaaagttgggtttcacaaagttgaaaaacagccggtttctcaaacaattgtgattt

SEQ ID NO: 606 - DNA, 269 bp, Homo sapiens
cgaaggtttccggctgcccttgctgctgggtggagtggagagggagacttctttttgttggttttaatttaaaaacacaaaggcctaaagaaatacgtatcttataatttttttaatttttgagacgttcatttaatgaattgtgcacgaatgaattctatatatataaaatatacatatatagctctatatttggggaggggcactgtctcttttttctctcatttttaaaatgaagtgttgttgcctttgtatgtggttcaaccatc

SEQ ID NO: 607 - DNA, 282 bp, Homo sapiens
  misc_feature (1)...(282): n=a,t,g or c
cttcattggcccagcttggcgaaagcnaggcacactgcttactgccttggggttgtggagatggacccgtgacctcgtggaggccgtgtgggggcagcagcctggcctgtgccatggtgggtgtcctggggcctgtgcggagggagccacctcaccctgcagcccagtttgcaggtgtggccttgtttctccttgcccagcagtgctgccttcagcggccgtgacggggccagctggacacacggtgagattttntcgtatgtaaataaaaggnattttggt

SEQ ID NO: 608 - DNA, 142 bp, Homo sapiens
caaacctggcgtctataccaacatctgccgctacctggactggatcaagaagatcataggcagcaagggctgattctaggataagcactagatctcccttaataaactcacaactctctgaaaaaaaaaaaaaaaaaaaacc

SEQ ID NO: 609 - DNA, 348 bp, Homo sapiens
  misc_feature (1)...(348): n=a,t,g or c
gcaagtgtggaccccaggtagcctcttggagatgaccgttgcgttgaggacaaatggggactttgccaccggatgcttgtnntngcacatttcaggggggtcaggagagttaaggaggttgtgggtgggattccaaggtgaggcccaactgaatcgtggggtgagctttatagccagtagaggtggagggaccctggcatgtgcaacagaagaggccctctgggtgatgaagtgaccatcacatttggaaagtgatcaaccactgttccttctatggggctcttgctctagtgtctatggtgagaacacaggccccgccgcttcccttgtagagccatagaaatattc

SEQ ID NO: 610 - DNA, 567 bp, Homo sapiens
caattttctatcacactgggctccatgatattctgttccctaagaactgcttctgtgtgccctgttttcatcccaagatttctcacttcatcctctcctacctggctcttttgtcccagggaggggtcctgttcggaagcagtggctgaatttatcccctgaaagtggttttggaggaaccgggatggaggaggccttcccctgtgggaatagaatcgtccactcctagccctggttgcttctgatacacagccactgcacacacacactcacactcacactcccttgtctgatgccccaaagccaattcctggggcaccctaccctctcgttatttggagtttccgttggtttacctgagttttctctggggtctgcacagaggcagcagcatggacatcatggcctctcaggtcccttttggttctcagtttcattggttcctctttctgttcccccattgacttctgtgccccaccctagccttttccataaccttaggtattcagtttggaggggttttttgtatttttgaggattcctgtattctgtatcctctcctcgcat

SEQ ID NO: 611 - DNA, 532 bp, Homo sapiens
aacaacatgatatgtgctggactggaccggggccaggacccttgccagagtgactctggaggccccctggtctgtgacgagaccctccaaggcatcctctcgtggggtgtttacccctgtggctctgccagcatccagctgtctacacccagatctgcaaatacatgtcctggatcaataaagtcatacgctccaactgatccagatgctacgctccagctgatccagatgttatgctcctgctgatccagatgcccagaggctccatcgtccatcctcttcctccccagtcggctgaactctccccttgtctgcactgttcaaacctctgccgccctccacacctctaaacatctcccctctcacctcattcccccacctatccccattctctgcctgtactgaagctgaaatgcaggaagtggtggcaaaggtttattccagagaagccaggaagccggtcatcacccagcctctgagagcagttactggggtcaccaacctgacttcctctgccactccctgctgtgtg

SEQ ID NO: 612 - DNA, 1522 bp, Homo sapiens
cgcgggggagaagcgggagcgggagcgggagcgagctggcggcgccgtcgggcgccgggccgggccatggagctgtggccgtgtctggccgcggcgctgctgttgctgctgctgctggtgcagctgagccgcgcggccgagttctacgccaaggtcgccctgtactgcgcgctgtgcttcacggtgtccgccgtggcctcgctcgtctgcctgctgcgccacggcggccggacggtggagaacatgagcatcatcggctggttcgtgcgaagcttcaagtacttttacgggctccgcttcgaggtgcgggacccgcgcaggctgcaggaggcccgtccctgtgtcatcgtctccaaccaccagagcatcctggacatgatgggcctcatggaggtccttccggagcgctgcgtgcagatcgccaagcgggagctgctcttcctggggcccgtgggcctcatcatgtacctcgggggcgtcttcttcatcaaccggcagcgctctagcactgccatgacagtgatggccgacctgggcgagcgcatggtcagggagaacctcaaagtgtggatctatcccgagggtactcgcaacgacaatggggacctgctgccttttaagaagggcgccttctacctggcagtccaggcacaggtgcccatcgtccccgtggtgtactcttccttctcctccttctacaacaccaagaagaagttcttcacttcaggaacagtcacagtgcaggtgctggaagccatccccaccagcggcctcactgcggcggacgtccctgcgctcgtggacacctgccaccgggccatgaggaccaccttcctccacatctccaagaccccccaggagaacggggccactgcggggtctggcgtgcagccggcccagtagcccagaccacggcagggcatgacctggggagggcaggtggaagccgatggctggaggatgggcagaggggactcctcccggcttccaaataccactctgtccggctcccccagctctcactcagcccgggaagcaggaagccccttctgtcactggtctcagacacaggcccctggtgtcccctgcagggggctcagctggaccctccccgggctcgagggcagggactcgcgcccacggcacctctgggagctgggatgataaagatgaggcttgcggctgtggcccgctggtgggctgagccacaaggcccccgatggcccaggagcagatgggaggaccccgaggccagacgcacactgtccgagccctctgctcagccgcctgggacccaccagggtgcagctgggctccagggtccagcccacaagctgcatcagggtctctgggagaggaggggcctccagggccaggagtcccagactcacgcaccctgggccacagggagccgggaatcggggcctgctgctcctgctggcctggaagactctgtggggtcagcactgtactccgttgctgtttttttataaacacactcttggaagtggaaaaaaaaaaa

SEQ ID NO: 613 - DNA, 550 bp, Homo sapiens
cacgagccaccatggatgttttcaagaagggcttctccatcgccaagaagggcgtggtgggtgcggtggaaaagaccaagcagggggtgacggaagcagctgagaagaccaaggagggggtcatgtatgtgggagccaagaccaaggagaatgttgtacagagcgtgacctcagtggccgagaagaccaaggagcaggccaacgccgtgagcaaggctgtggtgagcagcgtcaacactgtggccaccaagaccgtggaggaggcggagaacatcgcggtcacctccggggtggtgcgcaaggaggacttgaggccatctgccccccaacaggagggtgaggcatccaaagagaaagaggaagtggcagaggaggcccagagtgggggagactagagggctacaggccagcgtggatgacctgaagagcgctcctctgccttggacaccatcccctcctagcacaaggagtgcccgccttgagtgacatgcgggtgcccacgctcctgccctcgtctccctggacacccttggcctgtccacctgtgctg

SEQ ID NO: 614 - DNA, 460 bp, Homo sapiens
gcaaagtgagttttatttttttgtaattcctttatctttacttaaaggtgaatgtgtattcctctgggaggaataggaagaaaacaggaatgttaataatgtcgaacagaaaacttcctcccttattaatatataatcctcatgtatttatgcctaatgtaagctgacttttaaaaagctttcttttgttgcatgccctgtgcaggcatctgtattgtacatgcatgcctttcgtcctgttttcctgtataaagttagtgaacaaagaaatatttttgcctagttcatgttgccaagcaatgcatattttttaaatttgtcatatatggaaagagcatgtttgttacatgtaaaagctttactgatatacagatatactaatgtttgaagatgctgttctttgcaagtggtacagttttcaaatgttgttaccagtgaacacccttgtggtttaacttkg

SEQ ID NO: 615 - DNA, 1595 bp, Homo sapiens
ccggttcgcaaagaagctgacttcagagggggaaactttcttcttttaggaggcggttagccctgttccacgaacccaggagaactgctggccagattaattagacattgctatgggagacgtgtaaacacactacttatcattgatgcatatataaaaccattttattttcgctattatttcagaggaagcgcctctgatttgtttcttttttccctttttgctctttctggctgtgtggtttggagaaagcacagttggagtagccggttgctaaataagtcccgagcgcgagcggagacgatgcagcggagactggttcagcagtggagcgtcgcggtgttcctgctgagctacgcggtgccctcctgcgggcgctcggtggagggtctcagccgccgcctcaaaagagctgtgtctgaacatcagctcctccatgacaaggggaagtccatccaagatttacggcgacgattcttccttcaccatctgatcgcagaaatccacacagctgaaatcagagctacctcggaggtgtcccctaactccaagccctctcccaacacaaagaaccaccccgtccgatttgggtctgatgatgagggcagatacctaactcaggaaactaacaaggtggagacgtacaaagagcagccgctcaagacacctgggaagaaaaagaaaggcaagcccgggaaacgcaaggagcaggaaaagaaaaaacggcgaactcgctctgcctggttagactctggagtgactgggagtgggctagaaggggaccacctgtctgacacctccacaacgtcgctggagctcgattcacggtaacaggcttctctggcccgtagcctcagcggggtgctctcagctgggttttggagcctcccttctgccttggcttggacaaacctagaattttctccctttatgtatctctatcgattgtgtagcaattgacagagaataactcagaatattgtctgccttaaagcagtacccccctaccacacacacccctgtcctccagcaccatagagaggcgctagagcccattcctctttctccaccgtcacccaacatcaatcctttaccactctaccaaataatttcatattcaagcttcagaagctagtgaccatcttcataatttgctggagaagtgtatttcttccccttactctcacacctgggcaaactttcttcagtgtttttcatttcttacgttctttcacttcaagggagaatatagaagcatttgatattatctacaaacactgcagaacagcatcatgtcataaacgattctgagccattcacactttttatttaattaaatgtatttaattaaatctcaaatttattttaatgtaaagaacttaaattatgttttaaacacatgccttaaatttgtttaattaaatttaactctggtttctaccagctcatacaaaataaatggtttctgaaaatgtttaagtattaacttacaaggatataggtttttctcatgtatctttttgttcattggcaagatgaaataatttttctagggtaatgccgtaggaaaaataaaacttcacatttaaaaaaaa

SEQ ID NO: 616 - DNA, 383 bp, Homo sapiens
  misc_feature (1)...(383): n=a,t,g or c
tgccttcccttcaattttaaactgaagcattttaatgtgggtagaaactctacaccaaatacactaaacattttggtgcttagtggatttctttttaggtaactggtacttacttccaaagactgaatacaagccacactccatcatatcccttaaacttcatgaaaaaccattcaagatccccttgctgcaacactgttctcttcttctctactaaattctatttccaaaattggtaatagagccagaaggatcccccagtacccagccctctgcctggnacaaactgggtagcacaattaaattcagtatggggtggagcatggtacagtcttgggtggccaataggaaggggtagttggcataggtcacaccatncattt

SEQ ID NO: 617 - DNA, 375 bp, Homo sapiens
  misc_feature (1)...(375): n=a,t,g or c
cacgagctgctatgaagacatacttgagactcggtaatttatatagaaaagaggtttaattgacaaaaaagctaacaaagtgagcccatgattcaaaaatgactgtctacacttggcacatgagggactttatgatattaagagattaattaaacaacagtggatggggaggaagaacagacttttgagctcttcccaatataggaatgtgttagttctaaaaattttcttaagttgtttgcttggaactcagagtntatttatccatacgaaaaattcagaactatttnatttatgatatgggctaaaaagacttctgtaatctagcttgggaaacttaataatcattaaacttattttcaatgaaaaaaaaaa

SEQ ID NO: 618 - DNA, 222 bp, Homo sapiens
ggggcatggctaacacctccctgggcctcttcttcctaccttgattgagggtgtgatgcctggagccacagcagccactttgctaccatgacaaaaaggccaagagaatcacagagtcattgaccctatcattatttcaccaagccaataccagccgccatccttctccagaattcttgtaaataaaataaatccctctttgtttaaaaaaaaaaaaaaaaa

SEQ ID NO: 619 - DNA, 471 bp, Homo sapiens
  misc_feature (1)...(471): n=a,t,g or c
ctgacacctgtcccccgccccagtgactccgtctccttcacccctgcggctaccagcactccctctaagcaggccctccagttcttctgctacatctgcaaggccagctgctccagccagcaggagttccaggaccacatgtcggagcctcagcaccagcagcggctaggggagatccagcacatgagccaagcctgcctcctgtccctgctgcccgtgccccgggacgtcctgggagacagaggatgaggagcctccaccaaggcgctggtgcaacacctgccagctctactacatggggggacctgatccaacaccgcaggacacagggaccacaagatttgccaaacaatcctttgcggaccttnttgcaccttttgcaaccgttattttnaaaacccttcggcaatttgtnggagcaagttgaagttccngggggcttaagggtcaaaaggccaaggagttgaaggt

SEQ ID NO: 620 - DNA, 403 bp, Homo sapiens
  misc_feature (1)...(403): n=a,t,g or c
gagaagaggatctggctgctctgtttgaagcttcaatgaaactgtattaattgtcattttaactgaaagaattaccgctggccattgtagtgctgagagcaagagctgatctagctagggctttgtcttttcatctttgtgcataacttacctgttaccagtataggtgggatatacatttatcttgcaggaaattccccaaagctcagagtccagttccttccataaaacaggctggacaaatgaccactatgttagacccccagggctcgacttcaggggtcagtgttcctgtcccaaaccccacacagaatactctggcctctggctttcatgtaggccaaatgaggcaaaaaacttcagtatctattcaaaagtggtaaaattattatttccnatgggc

SEQ ID NO: 621 - DNA, 380 bp, Homo sapiens
  misc_feature (1)...(380): n=a,t,g or c
ggcttttggccangcttctttacagcatcctgcactccagcctgggtgacacagtgagactccgtctccaaaaaaaaggatgaggaatagaattctgtgcagatgtcctgacttggcaattttgtgtccctgcctcactgtctccaccaacccccgcctgtcctagtgttgttctgcctcctgtcctctcttgctctcttgtcagtctctggcttcctcggccccatttcacttcactgagtcctgacacccatctccctaggggcctgtgagaggagagggaagggtctgttctgctcagctccatgtcccccattttcctccacaataaaactggggactgggctgaaaaaaaaaaaaaaaaaaaaaaaaaaaaaaaa

SEQ ID NO: 622 - DNA, 511 bp, Homo sapiens
  misc_feature (1)...(511): n=a,t,g or c
gctggaagaacctttgtctgagggtagttcatagctggaaatacttggaatattttccagagtctctaaactctcatcttcccccacagatacacatccaagctcacaaataggagtagcaattctaggtggtagggttgtgtacggaacccctggctgtctgcatatatctcagaattaccccaggaccattgtcccaaagtctagagtctttacaggtaggcaaaatttgttttcaatgcctgtgcctcagctgctgtcacaaatacccatcttaggatcccatcagcttcccatcccccaccagacagccacagtaccctcactttctccctattgttctttcaaatcctgttctcaggaaagaaactgccactaattcattcacactaaggtgtaaanggattgataatagggattgagttaccttttcccacagacnttgtttttaagtatggacagagcgggccttattccaggggaaaggtttgggactggagggggtgaggtt

SEQ ID NO: 623 - DNA, 1700 bp, Homo sapiens
cggcggcccagactatccgctcccaccgcgcccccggcccacctggtggccccggcctggccgccgcccccgcgctgtgcccgggagctcgtcccggacgcgcgaccgggcggcgggggctcggcggccaccgctgcctcaagggagcgaggcgggagggtgtgtgtgcgcggctgtgagcaggggtgccggcgggctgcagcggaggcactttggaagaatgactctggagtccatcatggcgtgctgcctgagcgaggaggccaaggaagcccggcggatcaacgacgagatcgagcggcagctccgcagggacaagcgggacgcccgccgggagctcaagctgctgctgctcgggacaggagagagtggcaagagtacgtttatcaagcagatgagaatcatccatgggtcaggatactctgatgaagataaaaggggcttcaccaagctggtgtatcagaacatcttcacggccatgcaggccatgatcagagccatggacacactcaagatcccatacaagtatgagcacaataaggctcatgcacaattagttcgagaagttgatgtggagaaggtgtctgcttttgagaatccatatgtagatgcaataaagagtttatggaatgatcctggaatccaggaatgctatgatagacgacgagaatatcaattatctgactctaccaaatactatcttaatgacttggaccgcgtagctgaccctgcctacctgcctacgcaacaagatgtgcttagagttcgagtccccaccacagggatcatcgaatacccctttgacttacaaagtgtcattttcagaatggtcgatgtagggggccaaaggtcagagagaagaaaatggatacactgctttgaaaatgtcacctctatcatgtttctagtagcgcttagtgaatatgatcaagttctggtggagtcagacaatgagaaccgaatggaggaaagcaaggctctctttagaacaattatcacatacccctggttccagaactcctcggttattctgttcttaaacaagaaagatcttctagaggagaaaatcatgtattcccatctagtcgactacttcccagaatatgatggaccccagagagatgcccaggcagcccgagaattcattctgaagatgttcgtggacctgaacccagacagtgacaaaattaactactcccacttcacgtgcgccacagacaccgagaatatccgctttgtctttgctgccgtcaaggacaccatcctccagttgaacctgaaggagtacaatctggtctaattgtgcctgctagacacccgccctgcccttccctggtgggctattgaagatacacaagagggactgtatttctgtggaaaacaatttgcataatactaatttattgccgtcctggactctgtgtgagcgtgtccacagagtttgagtaaatattatgattttatttaaactattccagaggaaaaacagaggatgctgaagtacagtcccagcacatttcctctctatctttttttaggcaaaccttgtgactcagtgtattttaaattctcagtcatgcactcacaaagataagacttgtttctttctgtctctctctctttttcttttctatggagcaaaacaaagctgatttccctttttttcttcccccgctaattcatacctccctcctgatgtt

SEQ ID NO: 624 - DNA, 2255 bp, Homo sapiens
gctggcctgtttgggtactgggggaacaaaggtggagtcaacatctgcctgaagctttatggctactatgtcagcatcatcaactgccacctgcctccccacatttccaacaattaccagcggctggagcactttgaccggatcctggagatgcagaattgtgaggggcgagacatcccaaacatcctggaccacgacctcattatctggtttggagacatgaactttcggatcgaggactttgggttgcactttgttcgggaatccattaaaaatcggtgctacggtggcctgtgggagaaggaccagctcagcattgccaagaaacatgacccgctgctccgggagttccaggagggccgcctactcttcccgcccacctacaagtttgataggaactccaacgactatgacaccagtgagaaaaaacgcaagcctgcatggaccgatcgcatcctgtggaggctgaagcggcagccctgtgctggccccgacactcccataccgccggcgtcacacttctccttgtctctgaggggctacagcagccacatgacgtacggcatcagcgaccacaagcctgtctccggcacgttcgacttggagctgaagccattggtgtctgctccgctgatcgtcctgatgcccgaggacctgtggaccgtggaaaatgacatgatggtcagctactcttcaacctcggacttccccagcagcccgtgggactggattggactgtacaaggtggggctgcgggacgttaatgactacgtgtcctatgcctgggtcggggacagcaaggtctcctgcagcgacaacctgaaccaggtttacatcgacatcagcaatatccctaccactgaagatgagtttctcctctgttactacagaaacagtctgcgttctgtggtggggataagaagacccttccagatcccgcctggctccttgagggaggacccactgggtgaagcacagccacagatctgagccaggatgggagtgaatcccaggcggaggccagagctggcagccagctctgcctttccactgccgggagtgctgggggcccagcctggccccctgaagagacagccaagtgtcgtccacatactcctcccagagtgagctctaaccaggctcatttgctctctccactactcatctctggaattagccgcttaaatacaggtttttgttgctgagatgtgagtgaaaccagctagtgtgtcaacagtgaagacctggggacagttctgcgtctcatttctggattcctaccccctcttctagtcttgcccaagtagtcctgccaggcacatgccccatttggcacaggcctgcattcttgtcgtgccgtcctgggcctcaggctgtctgggaggggagatgctcacatttgtacaggctacatagactggtgcaagcagtgctggattccaggagtcttggcatctcatagcttgtccccgtgaggagtgagcagagggtctgggatttctgctttcagcaaaagcagtctgactcagtgggcagaatggaggggcccctctagccaggctcttacgccatggttatgagcaggttgatgagggtccttcggccagcacaaccttcctccctactcacggcatggagtctgactgcatggaagttccagatcctgacagagagaactgggaaggatccaggttcgcttccgttggtagcttgagtcccatgcctccaccctgccatctgaggaaggggtgacaagtggtcaaggagctgtggccacagacttttccagggtggtccttggcaggtgaggtgcgtctgtsccacccttgtcaggagccattgacgacgggccccccctggaccccccgggacctcagagtgggggcaggcagaagggagaaccagctcaagacattttggaggatctggccctggggttcttcagagaacaccctctaggggctttggggacatggcctgtccccacatccagcacttgcctccgccatggtcactcggcagcccttttcccaggagaagacacctctgggagcctgctcagtgcttgtcctgccatcctgtgtcctgggactgagggttactccagttgctctgtgttgcatactctcccccgcaagcctgtgtatgaagaattgtcccctggcttccagcaggccatggctggctgttttgtgactgttacattgtgcaggggtaattattagcgtggcttttaaaaaaaaaaaaaaaaaaaa

SEQ ID NO: 625 - DNA, 1259 bp, Homo sapiens
cggcgcccaagcggccccagcgggctcgcgtcgccccgctctcctcaccgagccgccaatgggctcaggatccgcccctgacgacgcgggccccgcccctggagacacgcaccgcgcagtcgtcacccgcccgggatcaggaggccgggggcgcccgccggtcgggcctgggcggccgccatgaagctgacgcggaagatggttctgacccgagccaaggcctcggagctgcacagcgtgcgcaagctcaactgctggggcagccgcctcacagatatctccatttgccaggagatgcccagcctggaggtgatcacgctcagtgtcaacagcatctccaccctggagcctgtgagccggtgccagcgcctgagtgagctgtacctgcggaggaaccgcatccccagcctggctgagctcttctacctgaaggggctgccgcgtctgcgggtgctgtggctggccgagaacccgtgctgcggcaccagcccccacgcctaccgcatgaccgtgctgcgcaccctgccgcgcctacagaagctggacaaccaggctgtgacggaggaggagctgtcccgtgcactgagtgagggagaggagatcactgcggccccagagagagagggcacaggccacggcggccccaagctatgctgcacactgagctccctcagctccgctgctgagactggccgggacccgctggacagcgaggaggaggcaaccggcgcccaggatgaacgtggcctgaagccgccttcccggggccagtttccttccctctcagccagggatgcctcgagcagccacaggggcaggaacgtcctgactgccatcctgctgctgctgcgggagctggatgcagaggggctggaggccgtgcagcagactgtgggcagccggctgcaggccctgcgtggggaagaggtgcaggagcacgccgagtgaccgcaggacctgaacgccgctccagcctccacggggaccccagcgtcttccccagcccccgggagctggagggtggctgccatggccgcagccccggccccacacaaaagcctccccggtttgccacatcggccgagggcaggagtgggtgttaggtactggctaaccggggcggtggagatgcctgtctacaccagtcctgtcccaggactccccttctgtggtctggaggttctaggctggcctgggctcttaaagggaggattttgcaggctgtcctccctaataaaagattttcccaaaaaaaaaaa

SEQ ID NO: 626 - DNA, 563 bp, Homo sapiens
  misc_feature (1)...(563): n=a,t,g or c
ggggggggnttactcacaaaggacagaaatctccaccaaggaagtccccattgtccaaactgagaccaaaaccatcacatatgagtctccacagattgatggcggggctggtggtgattcgggcacgttactgaccgcacaaaccatcacatctgagtccgtgtcaacaacgacaaccacacacatcaccaagactgtaaaaggtggaatttctgaaacaagaattgagaaacgcattgtgatcacaggagatggagatattgatcatgaccaggcactggctcaggcgatcagggaagccagagagcagcaccctgacatgtcggtcacaagagtggtggtacacaaagaaacagagttggctgaggaaggggaagattaagttagaaagtcatttttttanacaacactcanctttgggaacccctgagggattttntgggcccccnccgganttcagnttgggcttnaccagttgacttggnaannnnnnnntnnnncnnnnntnntnnnnnntncnncctnnnncnnnnnnncnntnttccncnnnnnttnnnnnnncg

SEQ ID NO: 627 - DNA, 432 bp, Homo sapiens
  misc_feature (1)...(432): n=a,t,g or c
aaaccatttgactcggtttgcctccctgcccgttgtttaaaccttacaaaccctggataaccccatcttctagcagctggctgtcccctctgggagctctgcctatcagaaccctaccttaaggtgggtttccttccgagaagagttcttgagcaagctctcccaggagggcccacctgactgctaatacacagccctccccaaggcccgtgtgtgcatgtgtctgtcttttgtgagggttagacagcctcagggcaccatttttaatcccagaacacatttcaaagagcacgtatctagacctgctggactctgcaggggggtgagggggaacaagcgagacctttggggtaatganttaacaccccatgctgggggatgcatggaaggtgaaagggggccagggaaccagttggaagaattttccaatcc

SEQ ID NO: 628 - DNA, 430 bp, Homo sapiens
cttgctccctctttctcttactttttccttttggcatgtttaattagagaacattttctataagcattattaagaataattgtccttaaggaatgatggataatataagggaaatgaaaataataaagaaaatgctacatggaatctcttattcttgaaccatgttcagacactattagctgtgaccactgcaataggaaatgaaaaagagggtactttttcactgaaaatcccactgttcaaagaaacaaagaaacggccacataaactaaatattcacaatactggaaatgaaccacagactttttgagtaatactccagtgaactcatgtccttaaatgagaagggcagccacagacatctgcccactggaactctctggtggccacatttagggatgcattcttccttacaagggcagccacctgt

SEQ ID NO: 629 - DNA, 450 bp, Homo sapiens
  misc_feature (1)...(450): n=a,t,g or c
cggagatcaaacaagatttattcaatttggtcaaagcaagaagttgggagagcaagatgtctcaaatccatcttaacaaaaagaggaagcagtgagtttttaggtagctaaggagtaaaggagaggcagtttcagggaagtgagggggaaaagtctgcgtttctttattctcaggtaacatcttgagcaaccagattcctgngtatcagcagctggtcgcaacgtccttcaaggcattcattccttctgcaaattttttcatgaccctcaagtgaccttctcatgtcttctttaggttgggacttggtgagcagttcaggtgatttgattctngtgcagtccagtntgtccagctgnggggttcagtcatttgagactgaacttngagctggatggatcnttcttccaaaggacaactatggtgatgcttgggaggctaaaattcttcct

SEQ ID NO: 630 - DNA, 265 bp, Homo sapiens
tctggaaaaaacacgctttattgggtagacaaataggcctgatgggaaggcctgagtcacagtgcactggggagtgaaaaagtaggcaaagtgcttgaagcttcccctttgcccccaccttaacctcctggggagcagctctggacactcagtacccagacctgggctcagcaaggcctggggtgactgtgcccctcactcctgctgcctgatctgggcagcccacccttcactggtaagacagaattctcaagggataggcgca

SEQ ID NO: 631 - DNA, 491 bp, Homo sapiens
  misc_feature (1)...(491): n=a,t,g or c
tgtggtgagggctttgggcttgttccctgaagctttttattataaaaacaagatgaaacatagatcacattgcagtctcgattgtaatgaacctcagctgaatgtgccgacagcggagtatctgatctaatgtggactttgaagcattttgaaatgaaaaaatcttgggatgtttttgtttttaaaattcctgtggttgttcgctaaatggcaaaatagggggccaccagccggacaagctccagaccacctacagaaagaaagtctcaggccattatgaaggccgaaacgctaacagccatcttcttctgggtgcacagccctgcggccatccccaccgtgagatggtagaaagggcgcgtgcaaggatcagcacccagtgtagaaactgacttgtaccccgaaggtaatgcaatgcgattcccaacaggctcattccagatataaaaaatatgtcatcactttcattaggtaatatttaanccaacant

SEQ ID NO: 632 - DNA, 388 bp, Homo sapiens
aaagacacatgcacacgtatgtttattgtggcaccattcataatagtaaaacattttctttttggtgtgagagaccctcccattccttagtaaaaacgtatttacttgcatgttattattgtccttacaaacttgtttttccctagagcaattgattttgctttaggtactagctgaaggtctagaggcaatacaatttaggatccttgtctagaaatcaatatgattcaattcttttcaagccaaatgatatctgtagactccagttgtgtgcaagccctgtgtggagcctcaagtcatctgcgttagtccagcttcctattcttggaaatcagctttgcttgattggacctatattggcatgttaatgtttgatggtggcctggcc

SEQ ID NO: 633 - DNA, 516 bp, Homo sapiens
tttttttttttttttcagcaaatgtttgttgaattttattactttttaaacaaattactgagtaatcttccttagtaatcatttctgtaactcagataaaaatagaaatttataagagtttttatttttgttacttgtaaaagtatatttcctagagaaaatatcagcagtggtagagaccagaaaaagtaagtgtgtgtgttctaaacagtgattccaactcaatgtgttcagagaaaacactttgaccctgtctgtgtttacagtccctgctgactgtgtactgtcgtatcctcagccttgttctatttctttattttagctttacagagattaggtctcaagttatgagaatctccatggctttcaggggctaaacttttctgccattcttttgctcttaccgggctcagaaggacatgtcaggtgggaaacgtgtttctctttcagagctgaagaaagggtctgagctgcggaatcagtagagaaagccttggtctcagtgactccttggct

SEQ ID NO: 634 - DNA, 314 bp, Homo sapiens
  misc_feature (1)...(314): n=a,t,g or c
ttttttttttttttttttgagtgtgtttttaatgcattttttttaaagattaaagtaaaatgtctcaattgtaaaaaatacacaccgggcaaatccttacctggataataaatatctacatcacagtacaataaaatttcttctctataaaatttaaatatggattatagtctatcactatcaaaagaaacactatgctaatatttccatattattaaaataacaggaaaaattacggggcttattttagaacctgangccatagccgttggaaagggcaaagagntttcaaatgtcgatcatcactctccatt

SEQ ID NO: 635 - DNA, 233 bp, Homo sapiens
gaaagttcagttcagtttattacagtgtcaagtagatttacaactattgcacttatcattctggtgacagaaggccaaaactgaagattgagattttcctctaataaagataggttttcagaatcttcaatataagatgttaaaattataaaggcaaagatatatacctcatgttccattccatatccttcctgctgttgtacagtttgctgcaaatgataatttaatttggg

SEQ ID NO: 636 - DNA, 361 bp, Homo sapiens
  misc_feature (1)...(361): n=a,t,g or c
tttgcgcactgaacgttgctttattcattggttaattttcctaacagcgttgtaaacccaggccgggatgtcctgagcgttctggcagaggcccgtgcagcctcggccccttccggtccgcgctanctggcctttgccctgagctccctcagcttcgcaagatgagcttcccagacggggccggggctgggctctgagggaaaggcgttcccgcaggtctggggccgccttcccatgttctctaaagcccagcacctgtggttcgttggcggggctcgtgggattggggtaagggctgtggtttcgaggccgtctgtggcgcccccagcccctaagtctgcgagacgccggccccgccttt

SEQ ID NO: 637 - DNA, 407 bp, Homo sapiens
ttttcatttttcttacttttaatatctaagataaaaaaaaaaacccaaccaccaaaacaacccatttgcatgtcggcgacacgctggtctcgggctccctttctggggctgtcctcccaggcggctcccaggtcctcatccagggaagagcccagcctcggccagaagccaccgcggcctccagttccgcaccgtgacaacctgggacccagcctttcagaaaggccaccaggaactgtttttaaagcatagggctgcactaggaggaagttttcccttgaggctgagagttatttcttgtggagaaatttcattttattgcctagtcccttcaggaacttattgacaccgctgtgctctccactggggagtgtttccagatactcttggggctcggacctcaaaca

SEQ ID NO: 638 - DNA, 371 bp, Homo sapiens
ttccgcaacacacacaaagaccggcatcagatttattattatctcttgttaaatattttcgatcttttctcagaacatggtctagaagggcatagtagtttttttcccggtacatgcgtgggtgggtagtgaggagaagggagcagaggtgcgcgccaggagccaggctggttctctgcagagaacaacctccagatcctcccagggaagcccgacacgccagtcccacgttggacgacgtgcagaggaagggggaggtccacggggacgacgaagatgaccttatacgtgcactcggcatatcctggagtaacgcgcagtgggggaggtggggaggggagggtcggccgggcaagcccctgcccgctgcg

SEQ ID NO: 639 - DNA, 384 bp, Homo sapiens
ttttttttttttttcttaaattatatttattatatgaaatacaaaatgtggaaaatttggaaattacagaaaaaccaaagatgaaaattacagtgactttgttccaccatacaaagataaccactcaacattttttagtatgccttccgtcttttttatctgctctacgtatacaagcatacacccatattttaaaaaacaaaattgaaatcacataacatgcactatttttacaaccttttaatattcaaggagcatttttctttcagtcagatgttcttttacatgacttttaatgtctgcgcggtactccaccatctggatggagatacaataatttacttaagcaatcccctattgcaaactttcgttacagcagaaaag

SEQ ID NO: 640 - DNA, 342 bp, Homo sapiens
ggaataatgtttatttaaagttacatttcagaggaaactatcttcaggagggcatgaagcctatattggctactgcaaaacaaccagaagttttataaaatatttctgatttaaattactaaggcactatagataggcacctatattacatacaatcttcaaacatttttaaaagttgaaactatgtattagttgatatctaaaatattaaagcccctgacaaactgaacggctaagaacttgacaaaatgagatgcctgtttcaatgattctgttgccagcatattaattaaaatacaatttgagattctaaattacacgatccagccttagtccagggac

SEQ ID NO: 641 - DNA, 478 bp, Homo sapiens
ttttggggtcagggtgcctttattggtgaatgggaatgtgtgggttggagctcaatggccatatgtcggcacgtccagggtccccaaggcagcaggttccaaggcactggggcagcccacgccgggggaggcccctgagcagcaggcaccattctcgccctggcagggcctgccacttggggagagcggaggctggccaggccttcagcaaagctgttgcagctcaatcagctcctcttgtgggacccggaggctttctgccggtagatctcagcggtgaagggctcttcgtataggagagccattatgtaggtgagggccaccagcaccgtcaggagtaggcccgtgggcgtggcgtgcatgatggcccagccaggtagttggctgtgcttccccagtacatggggttgtccaggatgttgaaggggaacacggtcactctcgcctccttgaggatcccgaagtaatcacctaggaa

SEQ ID NO: 642 - DNA, 359 bp, Homo sapiens
tttttttcaccgtgttcctggagctgcccgctgccctctgccctgtccgtccccggcagagactgggagccggccctcagcatgaccaccgaaactttatttacaacacgaggctggagtaagaggggtgggatggaggacagcagcagggccgacagaccctacttctgctcccgcctccagacgatgaccatgccgctgggttcactggaggccagtaggctctcgtcgcagttgaagctgacatcaagcacaggtgcactgtggccctgcagcttgttgacagcagccttggccgcccgctccacatcaaagaagtgcacgcacatgtcctcactgcccgtcaccacgcaggcccc

SEQ ID NO: 643 - DNA, 343 bp, Homo sapiens
tttatttgtgaaacgatacaaattttattaatatacaacgggaaatttgacagtttagggaatcaggtactcaatcttttgattctcttctgcacttatggtatatgagaagccagattataatcacatagttatttgataacacaaatatacaaagaacaaggagtgctgattttataatgcagtgttcagggacatgaagacttgactgtgtactcattgggccatgtttcttaaaatgaagttcaagagtccctcaaaccagaggtacataaagcccaggataaatatgacacatctgcctagggtaccaaagatttggggaataaaaagctaaataact

SEQ ID NO: 644 - DNA, 411 bp, Homo sapiens
ttttttttgacattttcacagggtgtgttttcatttgcctttgcgactaatgggtctctggaacgttccatcctggccggggaggtcagggcctgggcggccagggccagtttcgagaaagcaggttttcctttgtggcatgcttatttcaagcaccattttccctcctggttatacttgaaatggggctcggtgttgggaggtttcaaatgtggacattccgggcaaggagcctcatgaactctgtggacattcaaggggcctcatgaactctgtggacattctgggcaaggggcctcatgaactctgaaggttgagcttggaaggacggacacaggtcttggcagcctgagtgggtacaaacgctgatttttctggagtcagtcctctcctgctgatgggctgagagag

SEQ ID NO: 645 - DNA, 398 bp, Homo sapiens
tttttaatactgctggcatttattttaaaaggtattgagatacaaaaattgtatcttatcttgtaaaaaatatttatttatcaatctttctggcactattaaaaatgtcccattttcactagacagaatcacaaaggtatacccactcaatcataacaatttgttttctatggagcaatattcacagatcctgtgaataaataggtgacaaactccaggtggccccctgtagggtctgttatatttagagttttctggaacacacataattatgaggtttggctctcctacagtcttttgtttgccatttcccttgtctttgaaccaaaacacagctctttccaagcttggagcgtggagagggccctcttctcccattggtgaaggcaacaggttca

SEQ ID NO: 646 - DNA, 494 bp, Homo sapiens
tgaaacatgattaattttaatgtttatccaccagcagaaaaaatttaatatgtaaatccaccagcagaaaaaaaattaccaaaactaacattttacagatttttagtatcaaagcacaatacatttttcatagaaacaaatatatcaccattataggtaccatgatatggcaatatttatatacaaggtcatttaccatttaaaaaaaaatcagtggcaatggtaatgtaatacattagttcatctttgttcaactttttgctattatacttcctggcctgcaggagtatttgccaggatacaaaagaaaatatgtgacctcaattttaacagtacatagaaagctctggctgtccatgcttaaccctacatttactacatgatcactaggaatgttttcataccaccactctgactttattacatttatttttaaggccattcccaaggaatcaaacattttaacagattcatttggatattaaaggattatt

SEQ ID NO: 647 - DNA, 310 bp, Homo sapiens
cagttaagctattttttttaataaattgaaaagatgttctgtacaacataatagagtcataggaaatcaaaagcatatcagtaacaacttttagaaaaagaaatgaatgataaagaaaaacagatatgacctctcaatatcttggggaagtaagttaggatgatgtttcattcacgtcttaatgatataaataaaggataactctgtgtaagaagtagtgtttgtatctggtggtaaatttagttaaaaagcataatcacaagttacaaaaactgtaattacaaattacaaagaagaacaggcagacaat

SEQ ID NO: 648 - DNA, 315 bp, Homo sapiens
ttttttttttaaggaatgaactttttaatgtttttctgtttccattctaacaaacatgcatttttgccttcagaaaatagagtcaatagctgtgcagagttgaagaaaaacgtcctctggtgttccctctgcatttatcttgtgtagctgtgtttttgtctcgtagtaggcgatcacggggatggacgctcggtagtaggcttctaggcgcttggcgatggtcttggtggtgtcgtccacaggcaggctgctccggctccttttgagaaggcggttggtcatggtgtctgccgagcagtccatacagatcaccaa

SEQ ID NO: 649 - DNA, 415 bp, Homo sapiens
tttttttttatttcaaaactatatatatgagatttatttcacattttctacctactcagtcatgtgagctgttgctacatttgtgaactttctgacaccaagtgacaaatatccacaaaagatcatttacaatgtagacatcactaaagtctagatttaaaagtccagtgaaaatggcacacagttggcttacagaaataaaaaagtacaatatatttgaaatagtagggtttttgttttccatttatgcctacatcatggtgttacctatggatatgttatcaacgatattgatatcagatactatgacccatgacatttagtatttttagcaataagaagcacacttaaatctatttcaaaaatatgacatgttaaattcttaggaaagtatcaactttacaaagtatcatac

SEQ ID NO: 650 - DNA, 315 bp, Homo sapiens
ttttttttttttttgcaacagagcagaaaggatgctttatttgcaaaagagtggtgaacatctaaaaagttgacattgtatatgattacaaagtaaagagtactcttgtgagagaagttacatgttcattgttaaggaaattatatgtaaatcacaaagatcatggtctgtgaataatgtgccatatctcacaaaatatggtcattggaatcttattaaaattatctacaggtgacttcagtttccattctccaccctctgccttaagatacgaagccttgacatgaccacatcccagtcagcataagctccttc

SEQ ID NO: 651 - DNA, 495 bp, Homo sapiens
gcggccgcgacctcaaccgaagctttcccgaccagtttagcaccggcgaaccccccgccctggacgaggtgcccgaggtgcgcgccctcatcgagtggatccgcagaacaagtttgtgctttctggaaatctgcatggtggctcagtggtagcaagctatccttttgatgattctccagaacataaggccactggaatctatagcaaaacctcagatgatgaagtatttaaatacttgtcaaaagcttatgcttcaaaccaccccataatgaaaactggtgagcctcattgtccaggagatgaagacgagactttcaaagatggaatcacaaacggcgcacattggtatgatgtggaaggtggtatgcaagattacaattatgtgtgggccaactgttttgagatcacattagaactgtcttgttgcaagtacccacctgcttcacagcttcgacaggaatgggagaacaatcgtgagtctttgatcacattgat

SEQ ID NO: 652 - DNA, 441 bp, Homo sapiens
ttacaataggaaatttaatgaaattcatacttttaagcaatcatttcagtaaaagaaattgttatagatgatgtgtatgtatgacgatagattcagaactggttagagttgaatttcagcattacattttaaaggtatttgccaaaccctaaagctcattttatttcaagtgaaaacatcatcatgaaaaaagtcacgtcacattgactaacaaggttggtaacaaatgtaatgatcaactttatcatttaacatttcacaagactttttattggtttctaaaaagcagttaatattttaaggtacggtatataaacaaaatagccatatctgatttttggcaacatgaaaatgccaatttcctttcaaaccaattcccggactacagctacaaatgtggtcaacaacgtcatcctggagtaaaattcagctcctgacaca

SEQ ID NO: 653 - DNA, 378 bp, Homo sapiens
tttttttttttttttttggtcatactacatttcactttattattattaacatttatcatacatggttactattccaatctttcatgcagacaaaaataaacaatataaaatacataatgcactttgataattttaaccatacataaaatatggagtaatggaagctatgttacatggatattttacaaaggaaaaaaagatgacttttataataacacatccagatgaaatttatcattaaattttggatttcatatgatgttaagtatggatatattcaaaacaattactatttatagaaccaatttgatattttgtcatttaaaataatgaatactatgtaaatgagtacttataaaaatatttttaggcaaaaag

SEQ ID NO: 654 - DNA, 308 bp, Homo sapiens
ctaaatgctttaatttyytstcacaaatatttctgcatctctcagtcccttcttgttggaaaaaggagggctagtsatacatttstyaatggcacttttaaaatgtrgctttggtatatagaggtaacactgtacttctyaggtatgtyaataatammtymmggttataatggttgccatattagagaaaatgaataagcattagtctcagcaaaaacaaaaattagtttggmagtagataagctagacatatcamamctgcaaaammmtagcttcccagatagcgcttctactatgctgcamwtycc

SEQ ID NO: 655 - DNA, 325 bp, Homo sapiens
gaataatctgtgctttaatggaaaaatgaaacattaatttgtttagtttctcatacaacatgtttactaaacatttcagtgtcaataattycttaagattgtaacatttaaccttgtattggrgctaataccaattctagccatgggrgtatgttttggmctttytgaacaattttgrgtaaaatgaatgycactgtctttaaattgtacttggrgcaaagacaaagaaacatcagctcattctttccaactaatagaacatttaatgatgcaattythattacattattccaaggctattatcataatgttaaatattcttatt

SEQ ID NO: 656 - DNA, 320 bp, Homo sapiens
attctcacctctgatttatttyttacttcatataagatacagtgtaattcatttttactctctctagrggtttctcccatctaaacagtacaaatcttttatggacagrgtactttaaaaatcaaagtgtcagagtctatgatttgtagtttcatgtgaaaatactaagtattctggattccccaaggttaaattatattcagtataatycbbggtaaaatatattybgtatttbavgtttttggraactgtttattcatatatggtgtacatacataataactaaaagcaggaatgtyttatttcattaagatgtatag

SEQ ID NO: 657 - DNA, 263 bp, Homo sapiens
  misc_feature (1)...(263): n=a,t,g or c
ggttagtacacaaatagtttatgcagtaaataactgtggttacagttcattgttgtcagcaatacagcattttccatcacaattataggtgaaacaaaacctcatgaagtagtcatagcacattcatgctagcgagagcatattacaaagcaatgcacgtgcattataggggcagacaaaactggggaagggctatatttncactcacctctggttaactttgtgtattttgtcattaagacttacattatgtttgggtcaaa

SEQ ID NO: 658 - DNA, 180 bp, Homo sapiens
  misc_feature (1)...(180): n=a,t,g or c
cctactgttagttttatttcagaagcagtgtgaagaggtacatagctcgtgacatgttgcttagactctccttttctcagctctgcaccctgttatgtctttagctcaaaaacagaaagctctccctgctgtagctgagaccaccctccttccatcccctccatcaagaagctncccaaa

SEQ ID NO: 659 - DNA, 229 bp, Homo sapiens
  misc_feature (1)...(229): n=a,t,g or c
aaagaacacatttgctgtttttattggtgccttgcatggcagtaatactgaaaanggagaatgcaaaaaaataaaataaaataaacaaaaaacaaaaacgaaaaacaggttggtggcaacccacatcttttttttaagagcacataaactcctgttttatttttattgtggcatgaatgataacataaaaccaaaancatgaaaatatacaacttatattacactatgt

SEQ ID NO: 660 - DNA, 316 bp, Homo sapiens
gagtgctgtagagtttaattgtaagacaaaagcactgctacattatactttaaacataagtcatctttcagaaggaaggattcagtgcaaattaaaaccctatgaaagcccaactgtaaatttcatatgaagactctagaagtaaacttctagaactggaaacacttggttccaacagaatttgcttggggagaatatgtcttgaaaatgttaaatggtacagagaacatcatgtttaagtcaaccagatactaaaaaaagacatgctgataggtcttaatacataaaactaattgattagtagtagcatgcttta

SEQ ID NO: 661 - DNA, 294 bp, Homo sapiens
  misc_feature (1)...(294): n=a,t,g or c
gcgaatctgttgatttatttacggctcggtgagacgacgctggacgctggttagggtaagggttagggcaagcattagcagcaggggcatggccctgggaagcacctggaccccagaacataagacaggagggagagatgccatccattcagcgggcacttatgcccacgaccagctgagccagaccagcattcccatttcaccaccccttactcctcaagatgcaaatnaagctcagggctgggcggaagctggcagggctgtccacagggaggacccccgtgtgtctctcgg

SEQ ID NO: 662 - DNA, 345 bp, Homo sapiens
aagaggttaactcattgtttttatttggtaatcagaagaacatacaagtacttatgcattactagatgctgggggaaaattatacattgaaggactgtcaggctcatctgtgcaataaagatttacaataaacacatcattaattttcctgagaacagctcagtatactctgttttacatgaatccttatgatttaatcttgtatttggagatatgatgctatggcatttggataacattggttaagcagcatcttagagaacagaacactcttcctcagaatggatggccattcttttaccctgtgatgtacaaatgcaaattacaacctgcattttatctgcc

SEQ ID NO: 663 - DNA, 325 bp, Homo sapiens
  misc_feature (1)...(325): n=a,t,g or c
aagatattttacttttttnctttaatcagcacatttcttttgataaatagtcatgagacgtgttctgtgagtcactacaattctcacttggcacttggaacagtcgtgttatataggtttaccataactctcagaacaggagtatattacaaacaagtggagtagaacatagagaatacataatttgttctaatattcctcttccttagagccttcaaacttaaaccaagttgaaaaaaaaagtttcccaaattgaaaacattgcctatggattatctacagaagagaggaaaataagcaaccattttgattccacaaaccaagc

SEQ ID NO: 664 - DNA, 215 bp, Homo sapiens
gactattcatgttttcaaacaagtctctatgtacagtaaatatacataaagttctaataaacaacagtgcaatgcttcccaaagtcttaagcactagtatcagattcttacaacacagaaaccttttagtttgccaaatgattggattaaggatacagaatatgtcaaatactcacttgtggctttccaggtcaccctctcccgccaaacaaaca

SEQ ID NO: 665 - DNA, 424 bp, Homo sapiens
  misc_feature (1)...(424): n=a,t,g or c
tttttttttncactttttgccgaacgaaatttttacctcacgttcatctcaccaaagtctcttcagaggagcctggtttacagggtgatgaagctgatgatgatacagtagtgtacacactgctaacgtgaatcagactggaaagcaagtcagtacttcagagtagccccgcagaaaaagagcgatactaagccttcttagtgtttcgtttgttagtagtgatgaagagaaaactgcttggaagcttccatgggtcactagttagggacagagcagcacaggtgatcagacagggctgagcaaacacctgactgaccaacagaaccagtctcctcaggcagcttacattgcagtcaatacagagggttatgggaatttattgatttctgcttggaaataaacaaggttaaggcaaattagggag

SEQ ID NO: 666 - DNA, 409 bp, Homo sapiens
ttttttttttcatgaaatgacatttattgtttaaaaaagcgtgagtctggaattagatagtggtgatggttgaacaagtttgtgaatttactaaaaccactcaattgtacgcttaaaaaaaaaagcaagcttgagctgcctaagtcccgctcacacacactggacttgtactaaatgctcaacgattccattctctcagactatggaacattctgtcacatttttttccttcaggagatttccctaagaagagctgtttgcaaaatattgcacttaatttgaatccgggggacctgatgtctcctggaagaaaacgtacacttcacatgccttcctgcctgcggcagaatgggcgggagtgggtggggacaaggggcttcaacagcagtttccatggaacattgttttc

SEQ ID NO: 667 - DNA, 470 bp, Homo sapiens
  misc_feature (1)...(470): n=a,t,g or c
ttttttttaatnagaagaattactgggaactagcttggcactgttggacacagtctttgtctcagctactcgagaggctgaggcaggaggttcgctcgagcccagcctgggcaacatagcaagaccctatgtccgaagaaaaaaaaggcaaaatcagaattaccagaactgatttcacatgtgtaggtagcagatggtggccatgcaattcaggtctgtctgaaggcccccaggctgggttacaaaactgtgtaaggccagtacaaggccctgacaggttcccaagtggctggactngaagagatgccaagttcatggcctcctaacctgactccacccaggcactccctggggcccagcgacgttccctcctgaagccttgaaatttcacctccacctnaggagggccatctggctgggggattagggtttttggcaaaaattgaaaaacattcatttttccagaggca

SEQ ID NO: 668 - DNA, 350 bp, Homo sapiens
  misc_feature (1)...(350): n=a,t,g or c
aatgagggnaagggaggcaaactggactagaggggctaggaggaggcaatgctgggaaccaggtctccccaccacctgcgagtaatgtcgtgcaaatgaaaatgtgatacaagaactaatggggactaactcctcagtaaaaaaagaaacacaggttgagagaagagtgatggaacaaaaagaaatggaaagggatagcagtatgtaatgatacgctaattaacatgctgggacgntcccaaagaccttgggattcttagggaccaagtgggggccagtctcagagcctcccaatgggntacaaaggaaggatgttaccctaagggaagcctgggacaggtgcttgttgt

SEQ ID NO: 669 - DNA, 461 bp, Homo sapiens
  misc_feature (1)...(461): n=a,t,g or c
tttttttttctattttaagtgcaaatatcataagggaagactgaacttcttttaggagtataggacaagcagcaaggaggtgggatggctggagtagagtgaggaagagcaatacagagataaagtaagaggaagaataagccgggtcacatagatctcacagcaaagttttaggttttcttttgagtaatatgaaaagccatcggagggttttgaagagaagagagagacatgatctgacctacattttcaaaagcttactctggctattgtgtggaagtagaagcaaaaagtccctatggtggttgttgcaaccatcctggggacagaacgtggtggnctttgaaggaaggcagtggtagtgatggtgctgatgacaaaagaagtccagatttcaggatgttccnagggagccttttntaaattgaaaggacanctgagggcttcccaagttaaccgag

SEQ ID NO: 670 - DNA, 307 bp, Homo sapiens
  misc_feature (1)...(307): n=a,t,g or c
ttttttttacatgagatattcaacattttattataaaacaggctttctgttagatgattttnctcaactttaggtgttctgagcatgtttaaggtaggctaggctaagccatgatgtttagtaggttaggggtattaagtgcattttcaaattaccatatttncaacttacaatagtttcaacgggaggtaaccccatcgtaagtgggagggaacatctagtgcctgggcacagaagccggttctcaataaatataactcttctccatcttcttcaaacctcagggccagggtttcagtgacctcct

SEQ ID NO: 671 - DNA, 224 bp, Homo sapiens
  misc_feature (1)...(224): n=a,t,g or c
aaaaagctacataatatgttatttatttgatattctggagaagtccaaacacacaaagtgattctgtatttgcgagaaatttaaggagatgatgaaaatgggtaaaaaatagatttaaaagggtgatgaaagtattatgtataatattataatggtaaatatgtgatatgantttgttgaaatcaacagantatacagcataaagggttaattccanttcacaa

SEQ ID NO: 672 - DNA, 424 bp, Homo sapiens
  misc_feature (1)...(424): n=a,t,g or c
acatnattatatttgagaagatctttctacgcagagactgtgattgcttaaactgtacacaaacacctggaagaaaaataagagatgtagtcaatcacttgggaattttgcctgcaagaagccacacagctatatgcctggcatcatgtaaatgtccagatccaggagcccatgagagaaattcgtaaagttctagatgtgtaggtgtcatgtagataaggattggttcatatcttcccattttaacagtgcttccagtttcctgtcaccattgagtgacgctcattttacagtcagaactgtatgccatggacacattttatgtgtaacccatgtgggcaatcgcttcaagtcatttaggcagggaggggaaaactccctaagcctctaagntcagggttttcccacccttttggaccaggga

SEQ ID NO: 673 - DNA, 384 bp, Homo sapiens
  misc_feature (1)...(384): n=a,t,g or c
gttaccaagacacaattttaagatcaaacaagtgtcaaggtaggccatggcttgttggcagtagtaggggccctatggctatttccaggtatgggtggccccttttccttggttatctggggaatctgccacagcagacagcaaaaggtaaaaagcatccctttaataactacaccccactccagcaattgaggtttattcaggggtgggtcaaagtagtacaagacaaaaatagcttagtgaaatggnttagaatccagactgaggtgccagactgcctgcatctgaggtctcaggtcccaccatgtatggaggccgtgtggaccttgggggtgaggttactaggcctccccggggtttcaaatcttcttcacctgtaaaatg

SEQ ID NO: 674 - DNA, 332 bp, Homo sapiens
  misc_feature (1)...(332): n=a,t,g or c
ggaagtgagagtgtggtgaattaagtgatgagtattatgtacaattgcctttacaaaaaacgtatttttactgtggaagaaattcatgcagagatgcctgtggaaaagtatcaaaaaaaaaaaaaaaacacctttaacactatgacatactgattataatatactatgatatgtattattacagcattacttacacattctactttagggcaatgtaatctacttctgaatgaccttgttaatttttaagggcatcaggtggcatcaaggggcaaagctccnttaaaataantattaaaaacaggaaaggcttngctaatttgtgggcctag

SEQ ID NO: 675 - DNA, 494 bp, Homo sapiens
  misc_feature (1)...(494): n=a,t,g or c
tttcaaaaataatataggagaagagagtgggtgaggttatagaggaaacaagattggccatgagttgataaccagtgaggttgggtgaggtattttcatgaggtacatgaaaatttattgcactgctctgtctgtatttgtagagattattaaatttccataacaaatttaaatgtagtaaaaacaagcaagcaaattcctggtttcccacaatatgggtattgaaataaatttaaccctaatcgaaccagtcacagtggctcacacgtgtagtaccagttactcaggaggatcagctgagcccagaaggttgagaccagcctgggcaacatagctagatcctgtcaataaatacatggccgggcgcagtgcctccatgcctatagtcccagcactttgggaggcccgangcaggcagatcactgaggtcagaagttcaagaccagcctgaccacatggctcgtgccgaattcttggcctcgagggcnaaattn

SEQ ID NO: 676 - DNA, 464 bp, Homo sapiens
  misc_feature (1)...(464): n=a,t,g or c
tctactcaaactataagcttttattattgtattttacagatcattcattcaggacatgctgcatctggggttggcatcatttcccttttgaatgacagaatgtgcataaaagtctcttgcccacgctgaactcacacgtgcccggcagaaggagctctcacgaaggccagctggatgtgagcttgctctggcagcagcagtgctgtccttgtttctgagctgccacctattcactggagttaaggtgggtcaaagctgaaatttagcttggaatttaaagtttctaattttatacttttcattgtggtctggtcagattttaagtctgctttaaaatcaaaaggtcactcagtcactctaatatggatccattttngaatatggaaatttggttatttacatgctgtacctcaaatcaaagaaaagcacgcctcaatatcacgcgtagggaaaaactaggaaaa

SEQ ID NO: 677 - DNA, 223 bp, Homo sapiens
  misc_feature (1)...(223): n=a,t,g or c
tttttttttttggcgtttttatctttttgtattaaaaaagtagtaacagacacaaatatcaaaaacacaaatgccatcgnagacgggtacagctgagaacgcctgggtcccacctgaggggcagcaccagggactccatggtccaccaacctcccccactccagagcagctaggggctggaacccccgggtcctgcttgggcctcaggtctcctcccatctgg

SEQ ID NO: 678 - DNA, 372 bp, Homo sapiens
  misc_feature (1)...(372): n=a,t,g or c
cattaacttgacatctggtaaaacaaaattttgcgtanatctaaatcaaaacaaanaacagacatgacactttctcagttaaaatagtttaataaaagcaacaaaactgtgctaacgatcagaatcaaaaatgagatattaggtagacttataaaacaaagtatagttattttttgatttcaaataaaccatgtgcaaaattgtaaaatgccaatgtgtctgagaaaagcattaacagtccttttagcaatttatatataaagatgtttttaaagtgccacagcttaaggcattatattttaaagtttaataaacatctaatttcaacatctctccaagaacagacttcttctcaataagctataaactatt

SEQ ID NO: 679 - DNA, 489 bp, Homo sapiens
  misc_feature (1)...(489): n=a,t,g or c
aaaattgtcaagatatttattgtgttaacatgtgagacatacaatttgctcagtaaaaatagcacatgaaaaaatattataagcttatattcataaagaaatgggtatgttattacctctttttcttgcttgctcaggactattaatttgacaaggttggaatgtgcacagcaaagctggagacaccacccattttaacactgaatcactataccatgaactgacaggaccctgcatgaaggatggaaaactcatacccnaaagtcnaaggatccacaccaggcagccatgggaggggggggaaaatggacctataatggatggctaanccggcattttaattttccggaagtggggggggaaaccaggggccatggggggngtggaataaatggggttggaagttcccagggcccntaacctggtaccaancccttaagggtaaanttaaggttttaacctccatccaattaaaaaaggtgggggtta

SEQ ID NO: 680 - DNA, 479 bp, Homo sapiens
aaggaggaaatcttgtcatttatgaaaacatgggtgaacccggtgcacattatgctgagtgaaataagccaggcacagaaagacaaacactgcatgatctcacttacatgtggaacctataaaagctgcccttatacaagtaaagagtcaaatgctggttaccatgggctgggaggagagggactgggcagatgtgtcaaagaatacaaaatttcagttaggaggcataagttcagggatcttgtacagcatggtgactatagttaacaacaacgtattgtattcttgaaaaaaaggagtgatataggggtaccagagatgggcaggatgattgaagatcacagtccagccttgcaggaccccgggggacagggcgggcactcagaggttggacctccagcaggtagcgcaggcgacactggctctcctggtagatgaggtactcgctctgggagaatgttgagctgctgaaactctgg

SEQ ID NO: 681 - DNA, 446 bp, Homo sapiens
ttaaccagaaaagaatctctttaatatcttgtagccgtaagactgatacaactgaaaacataaccctaaatttgattctgcaggttgcagttacaacacaagttgaagtcacagccttgccggaactcttatgtaaagtttagggcattggatctggaaggagtgggaccctgagaatcgtaaagggatatttgggtggacttgagcaaatccaagaaccctgaactgaggaagagcagtgtgagtacatggtcaggggctccatgaatattcctgcctgcaaccccagcttcacaggcaattcagccttctccacactggcccggcactggctagctgctcaccttatggctcgaggcaggacccccccgcagccttacagctggagtgggaagttgctggaagttgtatctgtttattgcttttaaggctgtcatgagcagaca

SEQ ID NO: 682 - DNA, 566 bp, Homo sapiens
  misc_feature (1)...(566): n=a,t,g or c
ttaaaatgttcttttttggtcagtagtcttagtaagagatttatatgaaaagaggtaggagtatataaatagggtgttaaatatatcatgtcaccaaaaaatttacccgagaaatagaagtttaaaagcaattttaaaaaaccttcaatcaacaatatataaataacttaatctgaggtaagagggaaaaatgccctgcaaacactttagaaaaacacatctctgccacactacagaaatagacctttaccacatcttctggaatccccagttccctccatctaccaaagattttgggcaccagaactaaagattgagaatctctcccacccctaccacttccaggtaaacacaaagttcatgttcagccagggctaaagtaccaagaaaactggacccactctccatcccaccccatcctaggataggtggggccagggcagaaatcatggaatgctcaggactccanccctcccaagtgcactgagggaaggttctggaactggggcttcctcccaacaaggcantcacctcctctggggagttcattcacctcctctcccttc

SEQ ID NO: 683 - DNA, 438 bp, Homo sapiens
gattaactatgtgactaaattatattcaaattttatgaacagaaaatgatataaatgttatcagctaataaagagattatcaaagagtaagcaaccaaaacaagtaggcaaaaagcatcagagagtaattaatacaaagatgatgttgtttttctggatttcataatgtttatcatagttgtcaacttttctcattcaaaaaaacccttatttttatacctaattttaattaaaaatttttcagtttgtattaaagaggactccccaaattatatgagtttccaacttcataaaacctaaatctgtctttgttcatatcagataaaaataggccacacagactgccaagtaggtacagtcttggaactgtctgtggtgctggacccaaggttcacttgggctctctccatgggtacttactggcccaagccaaagctg

SEQ ID NO: 684 - DNA, 382 bp, Homo sapiens
  misc_feature (1)...(382): n=a,t,g or c
ccgagtgaaaacagtctgtttattacagcgtctagaggtggggatgcagaatgaggcggtgcccagaggaaggggcgcctcagcccagggncgnaccgtgacaatgcgcgcaatccaaatacagttcacccggaagacacggcagagctcccacgttacaaaggctgacacagaccagcagcgtgttgtgttgggaggggggtctgaccacgatggcgagggcagtcggcggggggtggggggcctgctgaccactgaacagactgaccgcatcctgggggcaagataaattaagggggaagtcttaaataagtcactgtgcgtgcctcatgggcccgaggagggggtatcctaagtttttagggttcctatcaattcctga

SEQ ID NO: 685 - DNA, 400 bp, Homo sapiens
  misc_feature (1)...(400): n=a,t,g or c
gagtgtaaattcaattttagcagattaggttttattttaactgcatcgggaaaaccacatagataaaactatcttattgtttatcctttacaattttttaaagcaaaacaaacacaacagcattttatttatttaattgtagtgcatccgtattttcacatattggattttaaaaaatctctgcttacaagaagaaacgaaagcccaaacaagaatgtagtatgtaagcgagtacaaaatgagatagagtagaaggcaaactgattacctaagtcccaagaagtcaggaaacaaagtgtaactcagatccaagcagggttaaccaggaaaggctggcatttcggtgngtaccnggctngctttcttcagcaactgcgctgntacaacattcctgggggca

SEQ ID NO: 686 - DNA, 230 bp, Homo sapiens
cagtaaaaactctttattcattccttcatgtgacagttggccttgagtagttacaaagacagagcagttcctgcctctcagaattctaagcagacattccagagctcacagatcagtgtcccaccagctgctaccctggaagcttcagggagatggggagcctggagtaggggggtgctgcaggaacccccggcaggcagtggggccaggcttcacaggcacccagggct

SEQ ID NO: 687 - DNA, 434 bp, Homo sapiens
ttttttttttttttgccattagaaatgcttttatttataaaagaactacttaaatataaacatctctacatagaaacactcttcacaaaaggactcttgcattactgccttctgaccacgaccagcagacactgtggatgtaaggactccacggtgtctcccgactcccaggattttaaggctaaatgtgcacttggaggaacaggggctgtaaggctatttcttccctttcttttaaaagacaaatttcatggtttcccattccaagataggcttcatagctggggaagatcttaagattcttggtctaaggggtaagcaaatatcttcctgagactgggaggtatgatcaggcacttgggaatctggctttgaatgtcatctctgaagcatggaagttagtggtgaaaaaaatcttatttccaagtctagga

SEQ ID NO: 688 - DNA, 453 bp, Homo sapiens
gggtaacataagacatttattactttatactaattttttcattcataaaaaggacaaagcacagtcctatactactccattgaaaaaatgataaaaaataactaaaaaatcaattcaatatttatcagtatcaaataaaactactatcacctttcctgaaatacaaagaaacaacagatgtatctatacctatataaagtttaattcagaatcttgcgtcttaaagcagatgattattagttagcttgacaacagtttaaaactgatggtcccagttaaatctgtacaactgtatgagaaaatgaaaagcttcgagttatcagtgtacgagagattttaaactactttatctctgtcagaaattcaaaactaaacaacctccaaagtctgttttcctcttacctttcagaaccatttcatggaaaatctaaccagttttgctcgttattatca

SEQ ID NO: 689 - DNA, 519 bp, Homo sapiens
  misc_feature (1)...(519): n=a,t,g or c
gaaacaacaacagtgtaatctttaacagggatgttaaaggtaagaagtcaggaagataaaccaaaatgattgagtatgataaagaattttgcatggcgattaaaatagaaaacctataaatgtagaaaaagcaggtctggacttagcaaagaaacaatatagtttggagaaggcatgaaataagttcttttcatgttcactgctggtcacancataacagagagtgatgtggagagctttgggaaggtttcacgttgagttacatcagtggtcaacaatggagcaacaagactccgtagaggatgccaccctgggagaattgcaagggaaaggaggctgaagcacaactggtaatagccttcagatatttaatggatatgcaaataaagctctgattaattgtattttcacttattatatatcatctttggacctttctaaaagtgggacnctagaaaagatatactgaaactccaaaagaatacttcagctcgagttgaatggattcaagatgttgtt

SEQ ID NO: 690 - DNA, 462 bp, Homo sapiens
ccgtgaaggaactattattactttaaaagtgagggtaatttacatatggggtgtatatattctaaaaatagtaataaaagtaccttttataagcaatgttgtgtggcttgtagaagaaagcagggaggaaaaaaaggcaggcaaaactagtctaggtctaggccctaaaaatgagcttccttcccacttgactggaaacgcccatgtgatttctaggctgaaaataggtaggatttaacgagtaacctagttcccttctgtctctgatttctgatcagctgatggagctgctagtaagaggggccgatcatgctcccagacgagtcctttggcctcttgctctccatcccaagcctgactccttcagcagcagccccctccttctgtgtccatctgatgcaggcaagcaggagcagtaagagggcatcccatgttccagttcaccttctatggggtgactag

SEQ ID NO: 691 - DNA, 202 bp, Homo sapiens
tacagaacaaacgtgttctttactgtgaagttcattatgaacctgaatccctgatcatttaaagcctattatccaacttatgcctcaagcagcaacatttttgtgttcaacaatttaacttactacacacaccttgtgcaaaatcacaaaccttctcatacatttatgagcttcagaatgtaactgggaagtgtagcacagc

SEQ ID NO: 692 - DNA, 417 bp, Homo sapiens
  misc_feature (1)...(417): n=a,t,g or c
aactattcttgttttatattttattatactggaacagctcgtgtcctctgtctcttgcctcggtgcctgggtggcttgcgcccacnatctcccccctttttattaactagaatcgccatcgccatcattgcttgttgttgacttcggacttggtttcggactccttagaggcatctgcagactaaaaggagacaacataagcataccaatattaataatgccagtaacaacaatgatcctctgacgggtttgagccatttgaagggattaaaatcagggtaattgtttagttatgccttcaaaaatgtgtgagccagggaactgtgggataaatggggcttgtgaagcctccaaagatttgctctttaaggttgtggaaatatcccaagggttaaggttatcatcccnggggttttt

SEQ ID NO: 693 - DNA, 381 bp, Homo sapiens
  misc_feature (1)...(381): n=a,t,g or c
tactgaaatacacagattcacttcagctcagcgtttactgagcatctgccatagggcactgtngcttggagctgggatttaaacagctccagtccctggcctgcacagaaagtgaaggccagtggggacaggcatgtaagcccgtagcagcagcacacccggccacagcggccaagtgcagcaagtactcacagaattccagggcgatgccaagaggctttcagaggggccaacctgtgagccagaactttgaagggaccaacggatttccccagatgggacaaggaacagaatgggtgttattacccaaggcaagattaaagtgttattgggaaggttnacagagggccagccaacatttggggcacaccacaggggcaa

SEQ ID NO: 694 - DNA, 449 bp, Homo sapiens
  misc_feature (1)...(449): n=a,t,g or c
tctanagacaaggtctcactatattgcccatgctggtctcaaattcctgggctcaagcaagccttatgctgtggcctcccaaagttctgggattacaggcatgagcactgcacctggctgaaaatgttttttaatgcaaaaaagctttacatttttgcagaatctaatctatttttaaattttgttactagtgcttttggtgtcaaatctaacaatccattgtcaaatctgaggaaatgcagatctacttctatgtttgcttctaagaattttgcaatcttaccccttacattgaggnccttgatccatgagttaattattatatatgagttaattattttatatgggggtcccacttcatttttttttaccatggccattatacaaatgttccaggnatggatttgttgaaggggacnccttctttcccccattgaatggggcggggg

SEQ ID NO: 695 - DNA, 428 bp, Homo sapiens
  misc_feature (1)...(428): n=a,t,g or c
ttttttttttttcaagttgctttttccctttttattaaaaatagactcaagcactttantgtatcatacaaaagtttcattcgctggtggcagccacgggaaagactggccccgtagcactgattttccacctcccctccagggacttgggtcccaggagcagtgactgggcctcagagaaagcccataaagactgcttactctggaagcagccgactaggggctnttccgcgagcagctntccccaccccacccaatggcaaaagttagatactcgaaagtgcctcttcagtgccaagataaactaacaagtgggagtgaaatgggaaaaccctttgattattttactattttcccaggggcctgggggnttttnagtttttccctgcaattcaaagtccttttttcccttacaataggggggtagg

SEQ ID NO: 696 - DNA, 341 bp, Homo sapiens
  misc_feature (1)...(341): n=a,t,g or c
tttttttttcacactttgtggttattcttttattcttgggtgtcccccaccagaccccagctgactgggcagggattggccccaggnttggcacangtgccaanncacccgagtgctcagccacctcttgccaaacatctgaatcaatgtcacagcaacacttggtttgctcctgttgcattctcatgacaggctcagcgtcaggtacgacgttcttgagggcaaggctgtcctccacaaagccctctggggttggggggtntccagaggcaagccctcagctctngggagacttgtcttgccttccgggaggaaacttggggggcaaaagggacaaaggg

SEQ ID NO: 697 - DNA, 560 bp, Homo sapiens
  misc_feature (1)...(560): n=a,t,g or c
tttttttttttgactttctcagatttattgtatgtcctcagacangtagataaaaatgcatggggtttacttccagggatttacagaccaatataagtaaacagctggggtttctttttaggctgtttctcttggaggtggtgcaggaggttgaggaaagcacctctgatgagcagatagctggaggctgttcccacagtcatgtctcagcgaagaagtcggagttcagcagccatcagaaccaaggtatgtgtggtgatcttcggaatgccactccaaatcctttgcactttcttttncacacagcaggagttntaaaagantgcttccttttattattaacactgagaatccatgcagagagtttacactaaacacatgantacattgtgtttttaggaaggctgggtnccctcagtccccagatctttgaattctaccattaagttcaggtaggtttttngagacagagntttgcccgcatcatatctgtgacactgactcttctgggtntagggttttctttggccaggggtttcttgagttcagnccctgatcat

SEQ ID NO: 698 - DNA, 356 bp, Homo sapiens
  misc_feature (1)...(356): n=a,t,g or c
tttttttttgaattaagtatttcatgtttttatttcaaaagaaaaaaggataccaagaagcagaagaatgaagcagttaaaaccagcaaagctgcaaagtaggaaagaaagctgagggagagattgatccgatttcaacgatgtggccacttaatgcaaacacaggggtctgatgctgcaaacctaagttcacatgagtccagtgacttcagcaggtccactggatccnccacagtgacagggccagggcccttcctgctgaatcctaactttacacattctaggncacatgtcatggcacatacagggttacactttatgggttacatggacattggcatgccatttgcacacag

SEQ ID NO: 699 - DNA, 377 bp, Homo sapiens
ttttttttttttcctagatacaattcctttattatcattatcatgccccctagcacatgaagctgggcttccacctagatcagctaaggacaggggtatgtttacaatgagaacaatttctctatgcgcattaggttaagacctcttctctgtttctagaatactgtgatgactcacatccatgggccagctgcttccagggaatccatctggcctcaacaacattgggctgcctgggaataacggtctgggcacttgcacaggggcaggggtatgggggagcaggcctcaggtttattaaggcagggactggggcactgctggaaatagggggaagggggggcagccaacatgttagccaggttcttccccaaggg

SEQ ID NO: 700 - DNA, 426 bp, Homo sapiens
ttttttttttcaccttattgcatttttaaaatctttattctgtagtgaattggtattcccaatctgcctaagcaaaggcatgcccttctaacaagatttgcttagagcagaggtgatagaaggaagaatccgaagaccctctggcatggcaatctgggagcagcacattgttgatggagtccaagtgagcacatttcacacaattcatttagtgacaagtgggcttgctcccttttcatccaggaaaaaaactactcacagaccactgcccagaatctggaataagaaccctcattttaaggtattcttcccaacaaataaatatctaaatattgaaagggggcatatcaggaaaacttaaaaggacacatttaaccaaaaccaaaaccctttttcaaaacaagtaaggcatgtctgtatttagtt

SEQ ID NO: 701 - DNA, 367 bp, Homo sapiens
  misc_feature (1)...(367): n=a,t,g or c
tttnttccaaaaatcaccacctttaatactccccggtcctgcacacacccacagtctcactgggctccaccctcacttactgcccgccgtggatggccttggaggctgcctgcccgcgccaggatgtttggcacaaagagcagccccgaagcccnctnaatgntctcgatgggcaccaggtaagcgntccagtgggatggcctnatccacaggtgcgttgggcatcacgtaggtgcggantncaatttgcccanctgntncctccaggttcagcaccttgaagaagtttgtgggcactgccangtggtttttgccgatgacctgggtantttacgtaggatttcccatcagnctctgtccatgggac

SEQ ID NO: 702 - DNA, 424 bp, Homo sapiens
  misc_feature (1)...(424): n=a,t,g or c
ttttttttttttgttttaacttcgttttgttttattttacattgttttaggagcttacacaatcagttctcccttgaatttaaggataaaacttgtcttgtttataggaaaattggtctcattggataagatcaaaacaaatcctatatatttttgtcctagctgtcaggatgttcagacctaacttaggcattcaactatattaatacttcccagatgtcagccacattcatttgcctgttattttttaaaattatattaaaattatggcggtaaataaaaatgtactcacattctcatcatgggacgatgggttacgggtttaggcttgtaggctaggtggaaaggccaaatttggtgggaaaaggtattggccntttatggggnggcctggtttctaactaggcctttggccaattttttt

SEQ ID NO: 703 - DNA, 339 bp, Homo sapiens
  misc_feature (1)...(339): n=a,t,g or c
tttttttttgtatacggtaactactttattattttcaaatgcaaactctttgcatttagtttgctattttacaattttacaaactaggtataaaagaccataaataaatgacataagttatgtgtacctaaagttcatgaagggaagaaaaataccttgacaaattaaaacaaaataggaaaatctatgtctaactccagaaatcactcaaattttgggaacgtgtgaaccgaacaatgttctgttaatttctttttcagtatggaactaaattataatatggccttatacattctnatttggaccacagtccttggcatatttccacntacttggggg

SEQ ID NO: 704 - DNA, 302 bp, Homo sapiens
  misc_feature (1)...(302): n=a,t,g or c
ttttttttaacctttatatacagatatatttatagaataagctatattaatttgtctctcctttttacagcaatattagtttgggatctttcatacattaagtacaaaaaaagtctggggagaatggcacgtaagagagtgcatgagggtctgtggggcccngctgctcgctactgattgcatatggggtcgcccaggnccctgggagggacangcccgcgcacttntctggcagggtctngggatggagtnggggtcggtctnagccnaacggggctgaggggggtngctcanacccccca

SEQ ID NO: 705 - DNA, 413 bp, Homo sapiens
ggttgtcatttattgttttcaacactatcttcatgacctgtttgtgttcagagtggctcacagataaggaaacatttttgcccagtcttaagttcatggaagataataggaagagtaattaactgcagcaaaaggttaggacaaaacatggcattatcagggcttgaaaggactttattgtggctgtggtgaagcaggccctgggtcttggcagatgataccagaagggcactgagtgcaggcgtgcaacttgaatttgatcccataaagtcagggcatcaggaagccattcagaatttttcaccctgtcagatgctcagatttgctaggagaactctgggtagtgggcaagaaccagagctgttacttcaggaattggggacagagggcatttttccccaaaaaaaaaaaag

SEQ ID NO: 706 - DNA, 454 bp, Homo sapiens
  misc_feature (1)...(454): n=a,t,g or c
tagtagagacagggtttcgccaagttggccaggctggtcttgaactcctgacctcaggtgatccgcccgcctcagcctcccaaagtgctgggattacaggcgtgacacatgtgcccggccccccttaaaactctttaatggtgtctcattgcttacacattacagttcaagctcccaaacacggaacacacgactccttcctcctgttcctaagaacttaaaatggnagtctcaattcttaccacttcctgcctcgcctatgatacaccaggcaacaccagattgcttgtaattcttgacaaacacataacacagcttgttctacctctgggtgtttgttcacaggtacccactctgtcgggnactgccataaccctcattnttattccttaaattcaaattggcatttcagntcactantttttttgggggnggctttttnttaatttttccc

SEQ ID NO: 707 - DNA, 398 bp, Homo sapiens
  misc_feature (1)...(398): n=a,t,g or c
ttatangcattacntntttattcaagctccacaataacgcagcaaaatacatactgatttcatatcaccagcgaaaaaaccatactcaaataagttaggnaacatccaactaggagtggatggacaaaaacctaggctttgactccacacaccacactctactggatcaggagaatactctgatgaggtctcatttccacttgagtttgaagagcctgtcgtttgggatttctaggaatatttagtctaatgattattcctttctgtagcataggatgatgccctcacaaaacagccagtgtgggttaattactacacagctgtcagctgccatacatcctaataccnattatttaataggcagttaacacttgggngcttggntgctttacaatggc

SEQ ID NO: 708 - DNA, 357 bp, Homo sapiens
  misc_feature (1)...(357): n=a,t,g or c
ttttttttttgctgactttaattacaaactttatttgtcaatacaattcacagtttatacatggcgcattccaccatataaattttcggaacagttatttgaggaaatgggtgtagctttctttctaaaagagcctgactttctaaaattttggttggattttttttaactttataaaagtacttttaacaaattaattgaatatttacatttctagcttaaatttaaattttggaaaataagcgtctattagtttatttggcttcttttaaaggattcnggggtttattttttccaggaccccaatccggatggccnccttattccggataccngctccccaccccccaccaccac

SEQ ID NO: 709 - DNA, 347 bp, Homo sapiens
  misc_feature (1)...(347): n=a,t,g or c
accaaacaaaanctttattaatgcattgacaatcagtgaagacaatgaaaacccaccacttttgtccgtgaactgagaaagaaaatggcaatgtcatatggcattaatgatgcatgagatctatgggtgtagtgtcacgtctaggcgtgtagtaatccagtcttcggccttactccagggagaaagattcagctttgttactttccagtcactctctcccgtaacacagcaccttgggcacagaaagcagagcgnccaaaacccaggantgagggacagttaaaattcaacttcaaggctacagccatcccaacgggtcctncccagctcccgcgggattttttacc

SEQ ID NO: 710 - DNA, 367 bp, Homo sapiens
  misc_feature (1)...(367): n=a,t,g or c
tnnaatanatttttactgaaaacttttattgtaatcaaaaagtgacataacagggttgtaatgaattcagcaaatcattctgctgatattttagaacttatatcagcttttgccaggcaattaaaaaattcaaatgtgaaaatttcacattacagtaaactccaccccaactaattaatggtggttaaaaataataggccctagcaaaacctctcatgttacatggtcacaactcacaattctgtacaaaagttcgtgttataangctctgatgtaaaantcaaataatcaaggcaggcaatattttaggtgcagcacagggtcttccatgtcattatttacaagggcttgaatctctttacattat

SEQ ID NO: 711 - DNA, 390 bp, Homo sapiens
  misc_feature (1)...(390): n=a,t,g or c
nagaatgatattagagttttattttgaataaaagantatgttttagaaatacatagtgaaatatggatagatgatgtgacatttgggatttgcttcaaaattacctagntcagggtgcggcggataggttgggggttacagatcgggagttagcaaattttttctataaagcgctacacaaagtaattattttaggttttgcaagccatagagtctgctgcaattactcaactctgccaatgaagtacaaaaacagccaaaaacaataagtcaacaaatatgtgtgggctgtgttccaataaaaccttatttacaaaaacagtcagaggggccgggnttttgtccncagggcccatcctaggtgtgcccgactaggtttgtaccgggtgg

SEQ ID NO: 712 - DNA, 424 bp, Homo sapiens
  misc_feature (1)...(424): n=a,t,g or c
ggaaacatgatcaagattgtntattagaaaaacataaagatgaactttcttggcacagaaatgagataaaatatacagtgctacaactgcagaattagcacggacgccaatctaaaaacagcaaatatttaacagtagctttaatgaattaatgcacaatattttgaaaaatctttgaccttgctcataagcagatgcctgccttgaagaaacactccaagtctgccgtgattccgagcgaaatgccaaggcagagtcaagacaatcattacctttagggctgaaacctgggcatgaggctgccccttctgggatgcctcctaaccagtctgatgtactggggaaggaggagtgaggtggggtcttcctcgggtcccagaagctgaaaacccagcccttcctttgccatcagttctgtgccaag

SEQ ID NO: 713 - DNA, 330 bp, Homo sapiens
aagaatgagtatttttgatttattcaaagtttcaatctaaaacctcaatgaaatctaccacctttattacaaggggactgatggttcctgaacagaaagaaacaaaggtcaggaaagatggcaccggacattggagagggaactggccgagtgtgcaggaggtttggtccaatagatcactgacaggctaaaagccacattttgttgagaaattacatcagaactgtttaaagagtataaacctccataagaaaactaaagatggcaaatgagattcaactctgttacttcaagtctataatgtcttcatcggagaaagccgtgagctgg

SEQ ID NO: 714 - DNA, 399 bp, Homo sapiens
tttacttttcataaatttatttatgaaattaaatgtggtttctggcttggagaaggaatagtgcaagagtgactgtccatgctgctgaatcctgtgggctccacgccagctcgccaggccctggctctgctcctggcgccccttggcaggacagggcgccatctccacacacccgctgcctgggctgtgggtcagtcctgtgtgctgagccacagaattcggtctctctcttatggcttctcacgctcacgagcgtaaggcaatcttctgtgtcactaagaatcaattctttttctccattgtttgttgttagaaaaacaagatgccaaaatccaaacaaaaaccaggaacgaggtgggttctggagctaccgcacagcaggaggcagactgaccacac

SEQ ID NO: 715 - DNA, 259 bp, Homo sapiens
tttattgagtacttactatgtgtcagtcacagttccaagggcttcatgagttttaactcatttaatgagttaatccggacaactcagtagaccaatgagacaggtactcttatcatctctatattacagatgaggtcactgaggcatacagcacctatgtaagttacccaaagtcctactgctgctatgaggcagctccaggattcaaacccagcagcctggctcacatctggcaccttttaactgccagcctactaca

SEQ ID NO: 716 - DNA, 415 bp, Homo sapiens
  misc_feature (1)...(415): n=a,t,g or c
tagagacagggtctcgctctgtctccaaagctggagtgcagctccatcatggttcactgcagcctccgnctcccgggtttgagcgatcctcccatttcagtgtaaccaccattcttatctctatcaccatagattagctctgcatgtctttgaacttcatataaatggaatcatgcatagataggctcttttgtgtctggattctctctgttaacactgtgtctgtgagactcactcatgctgtgtgtagtattatgcttcatccttttttgttgttgcatagtattccactgtataaatataccacaatttatttgtctgttttcccaattgctgtgcatttggggattgttttggtttttcacctattttggaataaggctgcctagggaccacccttggtatagggcctggg

SEQ ID NO: 717 - DNA, 477 bp, Homo sapiens
  misc_feature (1)...(477): n=a,t,g or c
tattaccntgagattcttcaactacctgcaaccnttctttaaacctaacgcaatctgatataaaagagcctgggatgagacttcgaaggcagaagtctactgtctcattaaaacaaggtcttggctattccatgaaatcaaatcttatttcagtgcatgtgtgttccaataaaactactgtattgcaggaggcaagtctatctggcctatgggtgtagcttgctgactcctgctgaagcctccctcataaaattaaaaacaccctcaagattaaaattacggtaggggcccgaattttgataaaatattttccttctctttttccacctccatgtatgactgcttgcaaaggcatttcaacaaatggcagtcactaataattgtcttccngtgggcagcccctgggagggctgccatnaaggttaacaaacctggtttcttttaaagggccantaatcccggctggggngctgcggc

SEQ ID NO: 718 - DNA, 514 bp, Homo sapiens
  misc_feature (1)...(514): n=a,t,g or c
ttttcaggaaagtttttattttaaatattggtgattctttaaccaggaatgcaaatgctactgaagtgctgtgtgtgtctctgtgagagccttcatataaataaattcatgcatctaaagagtccctggncaggccgcatgctgatattcaatttggggaatggtgatgccatcacatgcatctgggggaggcaacagggangcctagggnctttttntggccccctntntnacaaattccggggggatttnnantntttagccccggggatctctgggctttttggaaagggttcctgcttttcctgagttcccatggctgccctgctgccggggctgactaagcaggcggggctggctttctcagtgcatattttacatttttctccttcaaagagaagccaggggagacaagctggagctacagaaggtgctctgtgggggacttggggccnggtcagcaaccaagcccccacctgccccttttgggttnaagggcttngctcctccccca

SEQ ID NO: 719 - DNA, 298 bp, Homo sapiens
  misc_feature (1)...(298): n=a,t,g or c
cttcaacacagcagaaatttatttcccacccaggtaaggggaccctgaggtaggcagtgacttctgtcggcagcgaactaggccctctcaccaggctgccctaccgtgctcagtgctgcctcatggtgcaaagtggttgctgagctccagtcatcactttagccngcngaanggggaagggnangggnaaaanntttcccccccnctngggggatttctttncnnncccccagtnaggattttgngtttattataaggnaagaagagacagttagcngaggcttccctgtccaccagg

SEQ ID NO: 720 - DNA, 498 bp, Homo sapiens
  misc_feature (1)...(498): n=a,t,g or c
tgggttgggattttcaatctttattatttgaaattattgtttcaaattttattacataccatggccctagtattttgtttaaaatatctttatttttctgtaaagaacaagtgtgccatatttagcttttgatagaaaaaattaagaaactatcataaagggaatagctaaaagaaaggttagtaaagggagccatcacaaggagagattttggaaaagggtggtgtcttagtccattttgtgtttctgtaacagaatatctgagactgggttatttataataaacagaaatttatttggcttagttgtagaggctagggaaattcaagaccnaggggccagcatctgatgagggccttcttgctgtgtccacccacgggcaaaggtgaaggcagaaggggaaaaagagtntgtgagggaaaagaggggagcccaaacttgcttttataacccaacacactcctgaggataatggggnttaatcttttcatgaggggc

SEQ ID NO: 721 - DNA, 537 bp, Homo sapiens
  misc_feature (1)...(537): n=a,t,g or c
acattttatttataacaggaaaaatatatccctctatattttagtttaaaaaaatactgcttggaagcagcccatatcctgtgcgttttgtgaattttcaggtgagactccctcaacccgctttcccccctcactgccacaccactgctagtccatggggagggggctggggttcaggtgggacctcttggttgggagcctccattgctactttgcatttaaaggaccgagagtctcctcaagacaagaccactgttatgtgatggatggggggtgtctgttgctggatccagttccaaaaggtgcccagggaacctggggaaggtgactaccctatcatctcacagggactccccacactgggaaccccagcctcctggggtcctgggtccaggggctcttttcccctgggctgggtccatgggttgcgacacccacggcacccgggcattccacgntggtncttcgaggggagggcttnagagggctaagctncaccttctntttccctggggtngccagattcantccttncct

SEQ ID NO: 722 - DNA, 402 bp, Homo sapiens
agtttttaaataatgtcacactgaacaacacatttaacagctgaataatttgtaatgaagactaagcaatagttaaaatataacattattaacagttgtggaaaatacagaaatttatcatatcattaaaccagtttttattaaaaaacaaaatgtgatgttaggtcagttcagggataaattaagccatacattatattgacttccacttacatgagattcctagcaatcatatttgctgcaatgattacccactgacttgcattcattataacaaggtacaaataaaccaaatggccaaacagcaaccaaaatatactgttttaagagttaaacacattcttaaaattaaaatgctaaaaaggtacctaaggggcttaattgggggctctcatatttcaa

SEQ ID NO: 723 - DNA, 552 bp, Homo sapiens
  misc_feature (1)...(552): n=a,t,g or c
ttacaattgaaacaggtctttatttacacggaagcagagagacagagggatgagggcaggcaccccaaaagtgacttcacattcaccaatgtttcagtggcttctaagaccacagcagangnatnccntgggactcacagggtatgaaaatgtgttaccctccaaagcctcaaaacaaaagggttggattaaaaacaaataccaagtgtttctggcatcagttgaaaaagatctgagaaagaggaactattgaatgtccagaaaaatcaaagttctgggaggctaggaaatctgacatttctctgatagagagatcactgggtcatcagttcattttggggaaattctttacagttaaggtgatgtgtttcctttcattggtaaatttaacagggagaggcatcattatggggatacatgcagggctcgtgccgaattcttgggcctcgagggccnaaatttccctataggtgagtcgtatttaaattcggtaatcctgtccataggctgttttccngtggtggaattggttatnccgcttcacaatttcct

SEQ ID NO: 724 - DNA, 388 bp, Homo sapiens
  misc_feature (1)...(388): n=a,t,g or c
atcaaagatggctcagagaatggtaaggcaacagtgagaaacatcagctgtacttgtcgagaaggtgtctgattacacagcgttaccatcccagctggccctttgctataacagaggagtgggtgagtgatatgttccaacagctggtctaaagaccagaggcacagtttcaggtaaagtgcaggaacagggtagaggctacaggtggaaagatctagaagctctgtgtccaacaaggtcctcacgcttcttatcagcatggactgactcaatctaaatttggtgtcccccctccacaggttctagtagaaacctacggcatgaaggaatagaatgcagacagantatagttaaatcccaaaaaagggcccttttctttcaaaccctg

SEQ ID NO: 725 - DNA, 495 bp, Homo sapiens
  misc_feature (1)...(495): n=a,t,g or c
gtggagatggagtatgtatttattttacaaaaataaatcaccatcttcggaccatttgtagactggaacatttcgagcaatgagtgcgccacacggacgagtgccctggtgactccctgatgttcgcgtcacccccagggccaccttggcgcccgcatgagcctcgnttcccactcccggcctccaactcccttccctcgcagccgccattcaccttctgctgtttatttgtctgcagangcctgggacaccggaaaaggcgattccctgagcgcctgggagttggagacaattcctggttcagaatttaaacatctttctaggtaagcgntgctccaaaactcttcgccgcgtgggacttttgcaccaggggcggttggggagganttggccctccacggttcctgggcaaccgcggcctttttgaaagaggttctggtcaatatttaacttcggaggaatttggaattggattcctttaagttcttnccctgc

SEQ ID NO: 726 - DNA, 501 bp, Homo sapiens
ttccatccatttagcaaactttattcctgaccacattttatgccctgggtgtgaagtggtacaaggaaaatgactaagacatagcctaaatttttaacaagtaaatctggccatgcaaccaataaacagttcttagtcaggtgcctatagtcccaggtacttgggaggcttagggaagatgattgcttgaggccaggagttcaagtccagcctggggcaacacagtgaaacctgggtctctaaaaaccaaacaaaaaaaaactacagtgcttctcaaacccaaatcaccttcccagggctctttctgcccaaatatccctcaaaccaacaggatgtgtgttgggtaaatgttggaaccaattgggctctctggaaaaacttgtgtgtgtgtgtgtgtgtgcgtgtgtgtgtgtgtgtgtgtgtattaggtctgtatttaatactgggctattaggattccccaaaatttgaccaggcaccattccccaggccagcatagcg

SEQ ID NO: 727 - DNA, 422 bp, Homo sapiens
agcaaggttttaatggaaagcataaaacactggaaatatggacagaaatcagattattacccttttatttttttccctgcccctttcacaatgagactggaggggattcaagaaccacttgaaataaaggcgaaatgattagatttttttctcctaattgcctaacgctgatgtcatggtgtacgcaaaatcaacattgatctctaagtgaaagaggagaaacagaacaacatcaacagcctttcgaggtaaactgtggggccagaatctatttagggcaacccgcagggcccaaaatctctggaaaagcccaacagtgggagccagtttctggatgctcctctgttgggtgatctggatctttgagtggggggaaatctggttaggaaacagcctcctcgaggggagccctccccctgggt

SEQ ID NO: 728 - DNA, 169 bp, Homo sapiens
  misc_feature (1)...(169): n=a,t,g or c
ttcacaaaggtttattgggtccctgcctggtgctggtttgggttagtcactgtagaggatccatctgggccagcctgggaggggcaggtctggagtccnaggcagacacgaaaccgggggtgacaccaggggctttggaggctgccatgctgaggacagctctgggagg

SEQ ID NO: 729 - DNA, 359 bp, Homo sapiens
  misc_feature (1)...(359): n=a,t,g or c
ttattaagactgggtcacatccagctagtacatttcagtgccctttctggtgctncctcccaggagcagacactgcaaatttcagaacccccatctagagaaacccctaacctgtgatctagcttccgaggctcagtgttggttcttgtggtagtgctgatgtgtgggtaccactgaggccaggccacagtcgcatgtaccctcctctgggctgactcacgaggctacaggggacagcacacctaatgagcaggtctgtcctccagacatactcattaacaagcacgttcctgggctaaaaaataaccagatctttttggccgtgcccttcaggttgggagaaagaaaacttcgagact

SEQ ID NO: 730 - DNA, 434 bp, Homo sapiens
  misc_feature (1)...(434): n=a,t,g or c
ttttttttggctatcaatatatttattattagcatgacatattatgaaaaattattttccaaagacttagccagtaacactacaaaaatagaaagcccgttaattcctgtgaatttatctgtgtgtgtccatgtccagtaattatttcactgtctgtctgaagtactaacaatactaaatccaatgctcggcgccacgctgcaatctttggtgtaacaacgtcataaactctcggaatctgctccagtttatttgaaatgtctgaattaaaaattctactatttagtttactatattcattcaagatgtaagatgaaggagagccagagtctgtggcattttgcagatgatgttgaatgtatgtgctggcttcaaattctggatgagtaattggcagtggtatataggagagttggaaaggtatttcngccatc

SEQ ID NO: 731 - DNA, 423 bp, Homo sapiens
ttagctggacaaagtacttttaatgcttattttacaaatatgtacctgtggtgctaatactaggcaaagaaaacaggacgattcaagagcagcctatgtaactaccaactcaagcactaacactagctagatcaccttcatgctttaaaatttaaagttatggagtagctgtgcccaccccccccccaaaaaaaagctttaataaaggcactgcagcgttaactaagttttagggtaaatttaggcaattaacaattcgaagagacttgtggtttatgtattagtaattcaaattactgttttagagatctcaggtagttaaccaattcttgctcaaagcactaatgttcagtccctcaccatttatgctgggtatgagtcccaatgcatgggtattgcaacctattgtcaggccctaacatg

SEQ ID NO: 732 - DNA, 676 bp, Homo sapiens
  misc_feature (1)...(676): n=a,t,g or c
tttttcagttggacacaaatgtatttattttaccctagcaatagaacaaaatataatttctttagccatttttcatgagaatagttcattgtacagttgaggaaacatatgaaataaggcctgtggttgattgctagtggttaagcatgttttcaatctttgccttaatgtaaaagatttgcagtgaactgcaaactgatgcagaatatctctcctgcttttccaagtcttgtcaggaatagtaaggtacagtaaatttgtcccacaggattttaaagcctacgtcttgtatataatacaatgcaggcctacaaaaatggtgcagccatatttacaaatttagttcacagactgctgcagtaaaatggctggaaagttttgttttgcttgtttcacaatttctctaaacagcagcagaatcttaaaatacctggctggcatctcttttctttgtaacaaataattcactttagtatactctgtgtatatacaaagtttttgtatgttttataaaaattcacagaactgcaaggttcagtcacttttttacaccagagaaccacaggtcaagagcactcttcaagcagagttgagggactgcgnagccaatggtgccttattattaaacccgcatgggcctggatcctagctgagataagntgtaccacgcatgcct

SEQ ID NO: 733 - DNA, 446 bp, Homo sapiens
aaaagggagagtgaggctttttattgtgtatgaattcacgtggtatcgacaactccacacaatattaaaacactgcgagaaagtgggtgcggcacacctggaattttaaaaaagtcagaaataaaaacaaccagacatcccaatgcagatggcatagaacctgctagaaccacaggcggcggctggaaacaggagacaggtctttacgaaggttagatgggcagcggttccgtggacagaggaggaggcgcggctggccggcatatggcttctgtgcagagggcctggcctcaggcgttgggactttttaataagtgaccccttgaggaagggcgtggtgggctccacctcccacccggaagcccccccgggtccactcacgggcggacaggtgtgtgacggccctctcctacctgccccagaacttgggcaggacgggctgttaa

SEQ ID NO: 734 - DNA, 604 bp, Homo sapiens
  misc_feature (1)...(604): n=a,t,g or c
caaaaacagatagttaatactcctacttatcataaaactgtgttagaattcagcagctggattacataatactattataataagcctttattattgagtaactttacatacataatatttatatgcacaagtatttgagagcttataggtcaagccctgtgctaagtactttgtacccatgatctgatagaacccttataacaccttgatgagatgcagccattttctacacactacacatgatgaaaccagcacaggaaatcagataacttgcctgctcttggccaccacgcggtgcctgctgctttgtgttttatgggaaattgcacatggcaaacattcaaccataggcttcctgcctttattattaaagggcaaatatgggtaaggaggatagcatggggcttgatttgttcaatgacctaaaaataaactgatcttattcataccctgccttgttctaggaaaggattcnagtggcttctcagcagagggcagggcaaggaacaggtgctcaggaattggagcatctggcacgcaggccccactgcactctganggggcttcactctcctcagacacgagncatggaaccagagcttat

SEQ ID NO: 735 - DNA, 404 bp, Homo sapiens
gtttggcacctaagaaacatgatggttgtggataatgccacaagtacacagggagacccagtaacaagacatgcagggtgagggcaagcggctgagctgcccaagcatttcaaaaccaggactttggcttcccatgcagttggagggtagaagggatgtgcggaactgatgacttcaccggctcctcagcagcatgtacattcaaattgaagatgcttgagagccccactataccaaatcgtgagtctggtcactcctccagcagagcttggtgcagtgacagttagaaaagctgagttccaattgagtctgttgcaccaagagtccttttgaagacgctcatcaaagtaattattttctttttgagcagatgtacagcacatccatgggaaggccatgtaaaa

SEQ ID NO: 736 - DNA, 326 bp, Homo sapiens
atatttctcgtggtttataagtttctgaatttccaaatttgccactggtattttaacctacctacaatgttgactctacgtaaaattgatttttacatgtcaggaataagatgaggatcaacgaacaaatgcacagtctgtcttttctatagttcaatagtccatctttgaatagcacataatggaatgtcagaagtggttttttaataatgtatgtttacacttcattgatttataacaatcatggctatggttcttgggtagaggagaatgttttatactggaatgacatacatatgtaggtaaaatatgatagatctatatat

SEQ ID NO: 737 - DNA, 258 bp, Homo sapiens
aatagggcacaaggtattttacaggtcctcatcattctgcttggtattctgttggtgtaacttttgtgtgtgataaattcttctccagagacttatcctctaagctctccaatgtgtctttttagctggagctaatgtgtaggaaggccatttttaaagcaaatcaaaacattaaaaggtttaacatctgttaatcgggtgttttatctagaggacataaaagatattcacaatcctctagcttaccgacttaacgct

SEQ ID NO: 738 - DNA, 286 bp, Homo sapiens
  misc_feature (1)...(286): n=a,t,g or c
aaaatcagagactatttatattaaataactcttcccttaaaaatggcctgaccacagcaatgaatctgtaaacacagagtaatatttttcctacagtaaagagtcactttaatctcaaaagatacttttcactgttctaaatgacaggnttttaagcattttttcctatatataatacagcatcacttaaaattttatttaaagacagttgattcaggcctgccttggactggaaagaagtctttaacttagtgggattagtgcttcagcttggtcccaaatattt

SEQ ID NO: 739 - DNA, 261 bp, Homo sapiens
aagatccttaaaaagtatctttaattgatgccaaatatgaacagatcgtaaagtgacagaagcaagtaaaattgcatagatgaaaactatgcgcatcaattaggttctcaattcataacattcaatgtccttgacctgacatattacacagttagagaagggagaatgcgcagtaggtgaagatgagacacgtccttaactcaaggtggaagcaactggcaaactcaagaaataaaatagcgttttttcagcttaaatggt

SEQ ID NO: 740 - DNA, 316 bp, Homo sapiens
  misc_feature (1)...(316): n=a,t,g or c
aaacaccaataaatttnattttnctcttaagagagacagtcctgcttggcacagcagctcccctgtccttctcgccactctcagtgctctggctgtgtcatccttagacaatcgtccttgtctttatggtccaaaatggtgtctgtacatccagaccacacatccatattccatgctgcagaatggaagagaggcagtgaagggcgggggcggctcctgccttctcagagttcccagaagaaccctcacaacacatgggctctcatctccttgtccgagctaagccactgaccacagctgctatggagtaaggaaa

SEQ ID NO: 741 - DNA, 236 bp, Homo sapiens
caaatattttattaatctgtttggccaaacaggtaatggaaactgagaataataatttgctaaaaagttcaggtcatgaatgcccctttcccccaggaaacagaagactccatggttacagaatgcaccattgggttatgacaacgtttcaaaataatgtttccatttcatatgtaacaatgtaaacttcaaaaatagtaaactctaacccctgaccctctttacagatctatcac

SEQ ID NO: 742 - DNA, 447 bp, Homo sapiens
tttttgttttttttttttttttttttttttaaaattttaaaaatttaaatttattaggatttattaacacaattacacagaataaagttcaggatttcattaatgatggtcaccaatatgtgcttctttgtggctttttaacccataattctcatgattcaaatttattcatattatagttgaatttcatacacagcttcacaatgtggatattacaggtccaccagtaaaattaatgaaaacatatctttcatgaaaggcacataaagaatctaaactaacacatttaaggaactttgataactttgaatttctttacattacaaagaaaaaaatcctccaaatgaaacagatatgaatatagtttatggttacacacacacacacacacacacacacacacacacacacacaaatatacttcaacccagtgacaacacgtaactt

SEQ ID NO: 743 - DNA, 517 bp, Homo sapiens
  misc_feature (1)...(517): n=a,t,g or c
tgctcaataaatgtttactgaatgaatgaacgcatgaagaatcaatgaaggaggcggtgaaggaatgaatgagtcagtggagaacctgaattggttcctcaagccagccttccactgccctgcatgccctggcatcttggacatttctnggcactaggctgctcctgccacctcactgccaggggtgatacagggctgccggcctctgcaagccggggagnctacgntngtgcanggcatgggaacagtgtgctgtactcctcctggaagcttaggtccttgaatctccgcacggccagggctgcggtcaggctccaggtgaagatggagaaaaaggagaaggcgatggcggcccgggctgcgtccgtcccttcgttcagtgggttgtccttgggcttggagacctgccactggttggccaggtagcagaatcccacgaaccagaagaaagcccagaangccgagacaccgatgtcggacaggacggctttcttgcggtccttgacgctgctgatna

SEQ ID NO: 744 - DNA, 438 bp, Homo sapiens
  misc_feature (1)...(438): n=a,t,g or c
cacaagttagcaatggtatttaattttccttggccaatgttatgcttgagtttgattcatacaataaaaagtatggaccattataattatcttagatttcctctctgggtatctttttctggccaaatcttcatactaaagagacgttaagccacactgcattttctctaacttgcctgcaaagatttactaaaataaaacagattgatcttatccaagtaacaaaaacaaaaaagttatgaaattattttgctgcacaaatctaaaatactattattaaccataatgtcagcttacttaggtcaattcttcaattgcactattgctttgaactttcacaaactgtcattttccttccattctaaatatgacagttcagttactaaggaattggttttnagttaacaattaccttcaatttcatatgaaacaggagct

SEQ ID NO: 745 - DNA, 418 bp, Homo sapiens
  misc_feature (1)...(418): n=a,t,g or c
tttgcatctctggtaatgctttattgatttgagggatcctgctgcacctggctccctacctctccattctcatctgaagtgcccctcaggccttccagacacttgcccccaccagagattataatacactcatgagaattgatatatgtgtgtgtctgtgcaaatgcgtgtgtgtatatatatgtatgtgtatatatatacacacatatatatgtgtgtgtatctctataaacacatatacacacacacacacacacacatatatatatagatatatntgtnncngnngtacagtatttacaggtacaaataaaatnggcttgaaaattacagtggtggttgggacccatctcagttcagtttactcagcagatagaaaaataanggcccagtgggccttttgaacggcattngaatt

SEQ ID NO: 746 - DNA, 389 bp, Homo sapiens
  misc_feature (1)...(389): n=a,t,g or c
aaggactttttcccctttaatatgaaagtataactacagcagttcaatgtacaaatacaaaaaaagttctcatactaaaaaaaaaaaagtaccataatactgtacatacaaaaactgttcaacaagaatgatttaaatatgtctgttcttgtccagatctggaagacacaaatgtaaagttctgcaactgtattattgctaagaacatgtgcctgggaacactgtgtttccctttctctccctcagcccagccccgcctccagagtcccctgagcttggatcatgagccaacagcatccctgaagataaccagagccaaatgtttactcaatggaagtcattattcagtgagctgctgcttaccataaactnatgaaaagcacaggttt

SEQ ID NO: 747 - DNA, 318 bp, Homo sapiens
  misc_feature (1)...(318): n=a,t,g or c
attatttatttacatatacaacacttgtgaaaagggcgctagataagtagaacaagaagcccagtttctggtacatcctgcntctcagtcacctctaggtctctggaacttgaaagctatgtctcttcttgcagggttctgttacaatccattgattttccctcacggtataaagttccctttgcttaagtttcactggactatttcccccaaggtcattctgacaaatgatgttctttgttgtttatactgttcaataagatttcattttgaagaacatgatgnaatcatgtgacgacattcnttcccgttattgaa

SEQ ID NO: 748 - DNA, 395 bp, Homo sapiens
  misc_feature (1)...(395): n=a,t,g or c
gaattgtaataagctgtttatttacttttgccccatgaggctatgaattcctccaggacaaattggctggcactttgctgctgtttaataaatatctgacaatgcatgaatggcagtgtcctggcagaaaacagaatagtccaccttgagaggcaacaagtcctaacagctttttgtttacncagaggctgatccaccctctctcagagatcttagaggtggtgctgaagattgataaataggacacgaatgccctagggtcccttctgacatggtgattatggggcagtgactctggcagggggctgnaggggatctttgaaaagcaaccaaggcccggttgagctaatcacttgatatcagtttgggttcacagcagcttgtgttccagaaag

SEQ ID NO: 749 - DNA, 455 bp, Homo sapiens
ttttttttttcccatacaagatggtttattttatcctacacacagaaaattgcttatgagtatcacattaccgctcttggttatcagttaacaaaggctgctaatgaacagcatcgttatcaagttgggtaagagacgccctgggagtccaggcaaatcatgacaacacagcactttgttctgaaatatagctcatctttcatcacacacaaggagggtagcccagtccgagagatttcctggaaagtggaaaggcaaagaatattccgtgatgtgatcccagaaatacagggttaatattacaagggagagaaatgctcacggggccttagcctggatggcaattgtagaatgtcatggctttccctcagcctccaccagtccatgtcttcctatgcaacagccattgtacattggtaaataataaccacaaaataatttgtataagggggaaa

SEQ ID NO: 750 - DNA, 366 bp, Homo sapiens
  misc_feature (1)...(366): n=a,t,g or c
aatttaaaaagtttatttgtattaaacattatttcgataataagatgacaaaggacttttgtccttcaacattgtagcttctctctgctcattaagtgtctgccaaggataatccaccaaggataatcctgaagacagtgttagtcttttgatacagataagcattaacatttgccatccccaactgcattgcatttattttctttattataataattcaagcttcatgcttagatcactagaggacataaaacaaattanaaaatcaactatactgcatttacaatgaatgaggtggtgcatttctcctgctttctttctttttttcttcatctgttactgcatataatcatcatataattttaa

SEQ ID NO: 751 - DNA, 387 bp, Homo sapiens
gctggcacccgccacaaggcccagctaatttttgtatttttagtagagacagggtttgattatgttggacaggctggtctcaaactcctgacttcaagtgatccacccgcctcggcctcccaacgtgatgggactatagacatgagccatcagtgcttggccttcttgattcttgaatacggggtttgaggtgaaagcatttcatgaaaacttaagttcatacacaagagcatcatgaatattctaaaagaggtatctgtgcttttttttgtgaccacaaaatattacttcttatgaaatgtttacactaggtgaggaaaagttcattaattacctttaaaccgttccttattttttttaagattttaaattgtattttggcttttg

SEQ ID NO: 752 - DNA, 403 bp, Homo sapiens
gtgcagtggcgcgatcttggctcactgcaagctccgcctcctgggttcacaccattctccagcctcagcctcccaagctgctgggactacaggcgcccaccaccacgccaagctaattttttgtatttttttagtagagacagggtttcactgtgttagccaggatggtctcaatctcccaaccttgtgatccacccacctcggcctcccaaagtgctgggattacaggcgtgacacttgtgcctggactaaaacaatgctttctaaagcgcattctgcagcctgatgtgcctgtgaggtgagaggtgtgggagggacagaagctttgttcaaagaggtttgggagaggctggatacttagctcccttcttgtaagtttgccacacacattggcatattaaaa

SEQ ID NO: 753 - DNA, 323 bp, Homo sapiens
  misc_feature (1)...(323): n=a,t,g or c
gtgacatgttttttgctttattgaaattctctcttacaaaaggtctgangtattttaggccaggcctaatttgctttggtccctgaaatgcaggcccatggtcatttccatgtcctctgaagtaggtatgtaaactagtagacttccatttttaaggttcacacactttttaacattgtttttatttgatgtaaaacaagacttatgttgtccctaatggaaagaccaagtaagagagttatgtgcgtcttcatggaagggataactggattctttgccagaaccgggttgggaatttagtttgttcaatgtggcatctttca

SEQ ID NO: 754 - DNA, 445 bp, Homo sapiens
tttttaattgaagaaattttttaattaaaaaacatttttttgacggcttcttgttgagcagggctaccccacaggccatgtgcctagagtggccttaattgaaatttttgttacaatcattgtagattcctgtacagttataagaaataaaacagccgggcgcggtggctcatgcctgcaatcccagcaccatgggaggccgagacgggcggatgacgaggtcaggagaccgagaccatcctggccaacacggtgaagccccgcctctaccaaaaatacaaaaaaaccagacgggcgaggcggcgggcgcttgcaagtcccagctactcgggaggctgaggcaggagaacggtgtgaacccaggaggcggcttgcaagcgagccaacaccgcgccaccgcactccagcccgggcgacagagcgtctccaaaaaaaaaaaaaaaaa

SEQ ID NO: 755 - DNA, 418 bp, Homo sapiens
tttttttttttttttttgctagtaactgtttatttcactctatacatttggaaacgtccgctacatagctatggtcactgtgaccacaaacaacagatggtgataaagcactgaacaggaagaaaaatgcattccaccctcaaaagaaatgaaccagtgtttataaagacaacagatacagccttcatccttaacaaatatatttctttcccagtatttccccaatataaacactgaagagtgtttatatatattcagtgcaaggaatagtatcattggtacaactggaccacctctggagaaagaatgaaattgaaacatctgtttctgaatacatttcagtgtggtgtaataatattacactatagtgatgtgggagaggctcctctagcacccatctgcattccacatggaaaaa

SEQ ID NO: 756 - DNA, 293 bp, Homo sapiens
  misc_feature (1)...(293): n=a,t,g or c
ttatgaaaaatccaaagtttattgcaaattgtattttgcttcccttcgttcttcatttttacaggatttattgatatccatgattttttcacagatgtacttgttgactttggagagtctctgtgcaatttcagtttcatccacagtttcttgtgctattctgtcatacaaacactctctgacgatgcttagtttgtgaggcgagaggggtggtttagggactgcatctttctttttttttgtggcgacgctggtngacgcttctgtttttcagaacatcctgttccccaaac

SEQ ID NO: 757 - DNA, 330 bp, Homo sapiens
agatagtaggatttattttaatttttcaatctgaaaaaaaaaaaacccaaaacaaaaaaaaacaaactatcctcatatatatatatacagtgtcaacattttcagagcacttacattaggaaacattgtttctcttcaactgtatgacaatactgtatatgccacaataaaatttacaaaaacaatcgcatcagcagtcataacaaacatcatgattttacatttcaatacacaagaaaaaaaatagacatcttcccggcacttggctcccgcctgacggcaacgtctcctccacactttgagagacctcagcttttaaaacccagcagc

SEQ ID NO: 758 - DNA, 150 bp, Homo sapiens
  misc_feature (1)...(150): n=a,t,g or c
gagggcgggggggtcatgcgctcgcccccccgggagcagggggtccagcttgtcgagtccggggcgccacttccgagtcctgggcaccctcgggggggaatcccgggggccgcgncgtcgtctgagttcctgggcacactcggggagggg

SEQ ID NO: 759 - DNA, 431 bp, Homo sapiens
  misc_feature (1)...(431): n=a,t,g or c
gagtggcagcagtgaggtttattggagcatcctaatacagacgctggggcttgcattggtgctcttgatgtacagagcccgcacgttttgccagtttttcttaagcaaggacaccaagaaattgacagccagatgaatgttgtagactagctcatcatcggtcatcttcacgtggccaacagcgacggccaaacacagcaccttcttcatctggaacttgattgtcgatttcacctcatccactttggccaccatgttttcattgtgtgtcagcagggaggggaacttgccagccttgtttaggcctgggcccaggatacgtgggatctgcttaatcagagactcagaggccaaaaaggcatcgtacttcttagccagcttcttgaccaacttcttgtttttgttaagcttcttgagcgcctcgatgtccn

SEQ ID NO: 760 - DNA, 365 bp, Homo sapiens
  misc_feature (1)...(365): n=a,t,g or c
gggttaaatgatttcttatttattttaaaatatgataattatggcatgagtcccaacagtgagaggatgtatctgtaagttactccacacttttcaattaacatgaacattttttagtaggcatatatctcaatacttggataatcacttttgttttgcttgtgttnctnaggaanaaannntttnnatgnnagccagagaattaccttcagntgtntnacgngacaaggtanatnaatgngggaatgcatattcccaatacctaaagatagatngntgagctcagaatattactcagtcctaggagtaattttttcttcttttcctcccttnaacactccattggaactaactgagtaaaggca

SEQ ID NO: 761 - DNA, 397 bp, Homo sapiens
aaggttgaaattaggaatttcttttttattggccactaaagtcctagcaagtttctgacagaagcacagacagaaaatggaaacaaataccttactgggaatgtttccttgcttgcactaaccttgactacagcaataacgcattgcttaacagtcaaagtgcaccaggtcatttccgcaaatggcagggtgagtgactgtgccgttcccaaggaagcaaaacagacacaaacaggtcccacgcgctgggtgtcctggctgagtacagaggaggctgctagaccggcagtacccttttcccaagtgaggaaagccagctgtgacactctgcttgccggcaggggttccccaccctcccctccaccatctggcccatagctgtaccaccaattacatt

SEQ ID NO: 762 - DNA, 621 bp, Homo sapiens
  misc_feature (1)...(621): n=a,t,g or c
ccttctgttgagatggagtctcactctgtcacccaggctggagtgcagtgtcgcgaccttggctcactgcaacctccacctcccaggttcaagcaattctccccacctcagcctccaaagtagctgggattacaggcatgcgcaaccatgcccagctaatttttgtaattttagtagagatgggttttcgcttagtagagatggggtgtttgccaggctggtcccgaactcctgacctcaggtgatccgcccacctcggcctcccaaagtgctggggttacaggcttaagccaccaagcccggccgaccttcttctatttttccattctcctttccaaagccatggccatgcgctcctgtgtacaggtgcataaacacatcagtgtgccatccctcacatgcatgtcgttccccacccctccttcccagggcttctcttggctccagcgttcctctgggaccctctgcagatacagcctgtgctggacccccagccagggtgaaggctcattctgctctgtcttccccaatgcctcagtttccccaaaagctgnttcagtccttctagtaaggggctccatggggcaangatcccttangattaatcttccncttggggag

SEQ ID NO: 763 - DNA, 440 bp, Homo sapiens
ttttctaaaaaaatttttttaatcagtttaaaagttcgaggaaaaagaaaatcaatcagaaaagcaactataccaaaacagggttatccaagtgagcttctctcacttccttagatggacttcagcttataggatgacacgagatgcgagtaagaagctatttgcgcatttcagctgcgtgacttgtgtctgcgttgctttcctttctttcttctgtggactgagaatgctagtgcctttgaatttgtctttacaggacctgagggtcttttgatggtaagagaatgaatgatcattgctgccttgagttctgtgtgatccgtcaggcctcgcctccaggatggcaattgtagcctgagatgacgtagcccaagttgcacagcagagttgctgttctggaaacactgtgccgagtgaccaccgaccttcacagtgctagt

SEQ ID NO: 764 - DNA, 347 bp, Homo sapiens
  misc_feature (1)...(347): n=a,t,g or c
ggttctttttacatgtagcaggcttatttattgttaaattacananacaatactacnattacnacagattaactcagcaatgagaaaaggttgagtgaagatgtcaaagagttaatttaaccctttccgttgttaaaattttacactcgttctgttattcaacaaatatatatccccactccccagaaatgtcattttcttaattctctgtgtgttatatattgttttctcctattcactcaaatataatcacnaaatccaatatacaggagagaataaaggcagtaaaaagaaataatatacagagtatgataaatattttttaaaagagagaaaatatatactgg

SEQ ID NO: 765 - DNA, 431 bp, Homo sapiens
tttttgagggaacatcatgtctttatttgattaatacattcttcaatatcggcaacttaaggcagaggccacgtgtcaaacttctttgtatgtttctagcacctttcacaatgcatggttcatggcaagtacaacaaatgattgaattcgattaaatgtaggaaaatgacaagattaccttttccaatatgtcgcctagtgttttcaattgtcgaattacgattaacatttgacaacaaacccaagcagaatctacttttgttatttgaaggatctgtgaatccatctactaacacactagtagaagatgcatgaaaagcttctccaacacgattgtttaattcatagtagactattgaacaccaatgtttaggctcttcataggcaacaggctgaacatccctgctgggatatactgggcataatccgga

SEQ ID NO: 766 - DNA, 471 bp, Homo sapiens
  misc_feature (1)...(471): n=a,t,g or c
ttttttgtaagtaaaaccagtgagtctcttaaagacgcttttccgactgtccggtgcagagagggccccggatcggcccctcattcctcctcgtcttcctcttcttcatcatcgtcctcctcgtcggccttgtccgcggcanagttggcggcggcagagggcacggcgccctcgggagctgcggcggcagtcggaccttcgtccttatgctctttcttccacttcatgcggcggttctggaaccagatcttaatctggcgctcggtgaggcagagcgccgtgggcgatttcaatgcggcggccngtacaagggtaagcggttgaagtggaactccttctccagcttccaacgtncttgggtanccccgtgtaaggttttggcgggccccggtttcctggtcaaaggtccctnaagaacggaaatccaggggtaaaatgcggnaaaattggcttaaangggggcaatnaagg

SEQ ID NO: 767 - DNA, 381 bp, Homo sapiens
ctgaattaaagagatgaatttattggtaaatagataaaattaacacctattttaatatatccaaaccccttccttatatatattaggtaaattaaaagaaaaaaattatcaaagcaatactacagccagctagatcgccaatttacaaatgagttaagtaagtaccataagtttgtttgaatatcaggtgcttcagagtttttctcaaacagttacaaaagagattaggttcccaatcagttcacaaaagctaatttagagaatgtagcttaactacagtactgaggttgtcacacacttaactttcggtctcttgcttatttattcatatctgaggttcactgtttctactaggatacattccgcccacacccacacctc

SEQ ID NO: 768 - DNA, 346 bp, Homo sapiens
ctggatcttgctctagtgtgagcactcctgaacttcacatattctccttgtcccaaatgcaagggtttactctcaagagactctaggctcactgcccataaacctttgagttggaccaaatcttaacatccctgtggatttgctcatactgccctgggcagaactctttccttctttggaagtctgaattacttcatatttgacatctattttgaaattctgttttacagggtttaggatgggggtaggtaggcacaggaaagagagtagagcattctctcttttctagcaatttccattatcatgccccttctagcttttagaccagcagttctgagacagggat

SEQ ID NO: 769 - DNA, 390 bp, Homo sapiens
tacaatggctctgaaaaaaatttattgatggatctgagaattttttcacacatgaatcatttctccttccaatggttattgatactgatagaagttccccgctgagactccctggacccatggtttgtgcctgctgggcatcccactatgctgattcctactctaaaagacacttacagcagaaagcattcacccatgaccattatgaaggaaatattctgtccctcactcaccctctggaagctaatatggagcagcagtcactctatccagagccacatgttcacagttctctagcaagcaggtcacaccccgtgggtcccctattccccgtgacccttgttgatccatcctcttcctgctcagttgctcccctgctcacctggactg

SEQ ID NO: 770 - DNA, 370 bp, Homo sapiens
tttttttttacaggtggcactgtttattattgagtttcatattttatattgtgtattttatatttataattagtactagttacacatatgacatggacttcttcaaatcaaattcccagttatgaagctctgcagagaccgttcccacagcctgactacaaagatcaggcacctgaagacgcatgtcctgatggatacattcagtgctggctgaaaagccaacttcagtgtgtgccctaccactgtggatatttaaataaaacaacggtttttcaaaccatgagtcagctggaaggatgcccacgccacgcacactgcagcactgggagctgcactgggtggacgggaaggacgcaaactccaagcagct

SEQ ID NO: 771 - DNA, 403 bp, Homo sapiens
attaatgcaaacatatttttattaaagaatgaatgcatttatgctaaagaatagcttacatatgttgtaaagcaacaagcatatcttcaagaagtgagtcctcctcaatatgactccatgcttattctacatgcctgaaaactgggcccacacacaggggcacacgtacacgcacacaaacgcagatacggacacacagatatgcagaccgaaatgctgacaccatcgctctctagattggattagctctcatttaaggcttcttaggtgccgcagtgcccctaatattaccaggattgaaaacagacttttaggaaggagcagcattacttcgaaaagtagtcatctgctcttgtcctccaatgtgtgtattttaacaaataccatttaattctatgttgac

SEQ ID NO: 772 - DNA, 504 bp, Homo sapiens
tttttttttcgctacaaatcaaaaggctttattccttatataaacccacacttagaaaaaataaatagttaataaattataggcaaaccagttggtctcagccacgcctcccactgaggtccagggcagccgctgcagcagcagacgagcgggaaggtgtggccacagcttggctcaagggcgtggtctggactggggacgaagggacagaggaggaaggcaaggtctgggtgagggcagggatgggggctaaaggtgggttcctgaggcgtgcccaggctctggcccgggcagcaggggtgaggcaggggctcagctcctcctgggcctgggtgatgcggcgtgcgaacggctgcgatcccgagcaagctgctcccaggggccctggcgggcggcctggggcgcctctgcccagacagccaggaaatggacagtgaccttctcggagaagcgcacctttctggcctttaggggagtctcagggtccggatcatgagtaggggt

SEQ ID NO: 773 - DNA, 427 bp, Homo sapiens
tttaacatttaagacagcttttattaaatacaaaagcaaaataagctctaaggagtaaggtagggctacttaagggcgttttctgtggacagcggacacagcaccattaaggttagcttagatttgaacaaaccatgagcagacagctaactacatgttatgtttctcttagtagttttagggtctgcccagtaatcaagaaattttacttctccagaatacatgaacatgggaaccaaagaaatgtaaatatttcgaaaaagcactacacaataaaatgagacgcaatccttatgcaggtcaagatgttctccacatctacaatgtgcattaacaaaattaatgcagataagaccttcactccaaccccaaagatcttacatggttaatactattttccaaaatcagcagaacaagctgcagttac

SEQ ID NO: 774 - DNA, 362 bp, Homo sapiens
aagatctataaatatatttattataatataacaagaacttaacagtaaacatatactatgtacaataccattacagagaaccctgttttatatcattcacagaaatagccagttttgctccagtgtgatagatgaggagagaaacgaatttcaatgtcatctgtgttgagtctcgctgacaactagaacctcctttggcgtcagacgcacaccaatgctaacattagccctgccccaggcagttaggaatttgtgctccagtccttgggttcacacttgcaccctgtttgacataaatactttaaatgacatacaatgtatgtagttttgtgcttattactttttaaaataataaataatat

SEQ ID NO: 775 - DNA, 476 bp, Homo sapiens
ttttttttttttatgatttcacattaagttgtctaatttgctttgtggtggtgggttcatcccggtactacccataaacgaatcagtaaatgagacttagtttccaaccttacttcccgactagacaactgcatgaaaaattggatagcgaattatgagtccaagttctatagctggcatagtcctcatgctttagccccagcctctgagcttagcagaagacattttgggtccttatatattgctagtaggattgtataattcttgactgtgttgcagaatcttacaggactacaaaacttaccatgatgtgtcttataaggaagacttgccaggcaaattttcgggcaagccagcaaaatagttaaagtaagagtaaagaggaacacgtgaatgatggggagttggtctaggaaaatattgtgaggaaaataaatgaaattctatggttagccaaatagacaaagatagcttct

SEQ ID NO: 776 - DNA, 153 bp, Homo sapiens
tgggtttgaaaacatgtattattagaggcacatgtttaaaaacaagtacagtatgaaatcttccttttcagtgagccagtgaattttcattcgtttgtttgtttctatgaatatttggtttacttccttcttctgggcaagattagtatgcaa

SEQ ID NO: 777 - DNA, 486 bp, Homo sapiens
cctaaatgtttcaatgccataaagcttacattcccttgaagcagagtacaggaaaccttagcaatatgctaccatccagtaggatataaatataaagaagctgtatcagcaagggatgctcagggaatgtgtttgcagcccgtttcacggtagccgcttgagaggggatattggaagtgagtgactttctttcatttggcaaagtttccttatctcagcacctactctttctgatggtatgtttttgaaggctgcacagtacgactctgggtaccgtgtgtacatacatatgtaaggaataacgtttatgttgctcagaataggcactttttgaaggcagtaaatctaaaagtaaagttaatagagcctatatttagtgctcatcttctcactttgctgatgtgtatgctgaacagaagatcacagatttgagtcagtctcgcaaagaggccggagtcgcaaatggctatattcagagctggggaa

SEQ ID NO: 778 - DNA, 307 bp, Homo sapiens
attaataattctctatttattaaaaagggtcctacagctttacagccacagcaccggacacggccctggacagcgacggcgagcccggccaggggccgctttgcaacttcaatgccaagctcacgtctggctgcgaccgtggcaggctgtggcatccccgacagcggccggtggcggaggtatgggggcgggtggcaccgctcactcgagattcacagaacatggcaagcccgcctgactggcatggcagtgaatcgtcctgtacagcttcatttcaagaaaacagttaacagtaggagttcaaagt

SEQ ID NO: 779 - DNA, 228 bp, Homo sapiens
gaccacagaagtttttattgccctcctgctccgcaaagggaccttgcttctgctggtttagcacctcaagacgtctgtgatgttggtctcagacaccactttgccgtccactatcctgtgggtgttggtcttttggatgctttacaggtatttgctgctgtccagaataccaccaagattgaagtcctccccatcttctaagcaggcggcaggtaaggtggcaatctc

SEQ ID NO: 780 - DNA, 427 bp, Homo sapiens
aacagtgagatccacctttattgaaacatcacacggcagcatcagggctcccacacctcacagggcagcaggcagttcacaggacagcaggcagttcacagggctttgggggcctcacagggcagcaggtggttcacagggcttcggggggcctcacagggcttcggggggcctcacagggctgcagggggttcacagagcttcaggggcctcacagagcttcaggggcctcacaggactgcaggggggctcacagggccctgtatgcagggctgctggtacaaagaagaggcccagagaaccctaacacagcctggggccccggggaagtcagggcttccagcagggcaggtacagaggcccctaggacttggcaggagctcagccttggggacagtcccacggaagacgctgcatccgggctctt

SEQ ID NO: 781 - DNA, 491 bp, Homo sapiens
attttttccgaagtgaaacacgcagctttattaagacaggggcggtagaagaaggtctccatgctgaacagattacattatggagcccgggagcctgggaaggatggggcaggagagtgaagggggctttgaggagaggtcctgccaggaacatctgtccctgttgggggtgaagggtaagggggccagggcctcagaagcggccatgccagtgatcaggggaacaccgatggttcctctctcggggatggtggccagtatggaacctcgggggtgacctgcgcctgggtccccgcccatagagctgcctctggaggttctgggaaatgggccgcagatgcatgaagttgcagaagccacctcgggtacattcccgtgcacacctgcccgttgaaccacggttactgagttcagcacggcccgctcttcaatctctccctccggaacttgacatagacgttggccacgaggtggtccccaaggttgtcgca

SEQ ID NO: 782 - DNA, 434 bp, Homo sapiens
tttttattttcaatcaaatttctttttaatgaaaactaatttttaagggcaagataccacagcagaagaaaaacctcttgcaagaaaagacttcatggtttacaacgatcaaatgtatgggctatttgcctgattggtggcctggactcagcaagagattcctttgcagcagaggttggccacacatctgggggctgcaacaccactgaaaagacagctttctaagcattagtgtaaggcaaaaagcagagtgcctaaacttgtccatttccaccaagaaaaaaagtttcatagcaaccttccttcaccagaaaggcttactttatgatatgctaacagaacagaaaagcaggttgggacaagatacagactttgttgcatttagctatgacccttctctcccctctgtggatgtgggcagggtggggagaggc

SEQ ID NO: 783 - DNA, 238 bp, Homo sapiens
ttttttcaaatgcattctttttatttgagaaggatgatctcaaggcagtgcccgtttgggaaagatgtctttcatcatcatgtacatcaggatcaaccattactttcagcaaagtacaaaaatacacacgtcagtgacttccgtacaataaatacataatcatgcatcccacaataaaaggcaccgaaaactggtcacttagtagtcataaaaattactagctacattaacaaaggcc

SEQ ID NO: 784 - DNA, 434 bp, Homo sapiens
tttttgggtagggatggtatgaatttaatattttttagtattacaatatattcttataaaaaaggtgcaagtgaaaaaggacactgtagattatgtccattagcctcatttgtcatctgaggcagctggtgagaacagccttgggtcgaaggcatccctggtagaagtcgggggagatagatagtcacagttccccagttggtggaaatgggatgggagtagggagaggctggaacagacccttccccattcacctggagaattttctcctcccactgccctaaacactttatttccatcacaggggagaaatgctgctgagaaggttgtgtttgttaggttgatgacgaattttacattggccacaaaattagctagagaaacttatctaaaggtggcaggagcagtggggagggcatgaagaaagcaagacc

SEQ ID NO: 785 - DNA, 404 bp, Homo sapiens
  misc_feature (1)...(404): n=a,t,g or c
ttactgacacacagctgtattgtttatttgctgatgtgagtattacggtactcatccttttgtgcatgtaaggactcatttctcctggatgtgtaagcaagagtggaaatgctaggccatagggtagatgcgtatttaacttgatgagaagctgttcagtttcctgccgtgggtgcaacaaagcacatttgcaccagcagcgcctgggagctgctcttctccgtatccccaccagcacttggtactggcagaccttctcctctgagctattctgatagtggggcagtgcgatttcacggtttttaatgagatgtggagcacttttcagaggctggcctggtttttgtagctgccctaggcacnctcgaggagggatgggaggggggttggtgaagaggatgttc

SEQ ID NO: 786 - DNA, 421 bp, Homo sapiens
aagtttcttggaaatttttttattctccttgccaacatttcttttgacattttattacttaattatgtgacattaagaaataatttggttgcatattattttcaaaaagcagtaagaaagtagctattgagaaagaaggagggccataggtttttcaataaaacgttagaaacattataaaaaacgagactcccattacatggaaacacatgatcaaagatcagactaacacacattcaaacaggcttggttcgaaatagagttctccatttctttcagatgagccttttttcttaggctctttcagaagcacttcacaatgaacagaggtcttgccagctcatttcattagcggagaagcaaaggtatgatggcagaatcatgagaagatggaaataaggcctgaggatatggcttgatc

SEQ ID NO: 787 - DNA, 339 bp, Homo sapiens
ttttttagaaaagaagttgtttttattttaattcaagagggttggaaacataaaaacagtacattttccttgcagaaaattaccccatttaaattactatttggtacagagattatttattacactgcattttaggcaattttctaacattaagtgacaagttatacttttgattttttttttcacattggagctattatgatttgcactcataataccaaagctactgaactcaccaatttttttcttagtaattaaaaaaaagcacacagaaaatataactacaattagattaactttatcaaaagtaactctttcagaccaaacatccagcaaaac

SEQ ID NO: 788 - DNA, 368 bp, Homo sapiens
tttaaagtttttttcagtttattatttcatgatccctagtcaaacactgataccccaaaataggattttccttccttcctctgaagattatttcaaaaaatccaagaggaataacagactttctggatgctgctctaccatgttcttctgttaaatcaagttccttttcccgcaattgaaggatgttgcagatgtgaaacgtgtggtaaagaacattgtctttgctttcaggtcccacctggccctttctggccgtagctggtactagattttgataaaagtatcctaatactcagggactatttctcaaagaccagaatcccaagagccagagactggatgagagacaccaagcacaagacagcaat

SEQ ID NO: 789 - DNA, 337 bp, Homo sapiens
tttttttttgtagttcagaagccaacccttattttattaaaatgtgtacaagagatggggaaggaaaaggaccagactgtactgtggccatgtacacaaaggcatgcaccacatcccagctctgctgccctgggctgtcccacaggcagctctctagaacttgagagcctcaaaaggggcctcatgaagcccagatcttccctggtcaagctgatggcattcgtataactgaaagttggggaagaccaccaggtcagtggagtggagaggttttgtatatggtcttctttgaagaaacttacttcttgcaagccctggcatcttccaattggctgtc

SEQ ID NO: 790 - DNA, 412 bp, Homo sapiens
tttaacaaaatgctttatttctatttttaaatgagaggcattcccatgaaatatcaaaaggcatttacatgtgttgttttaactcttcttttttgatcacacaaagtaggtagaaaagatctgctgaaatagagcaaatcagaaaccaagtagtgtaaggcattaggagatacatgaagagaatcgctatttgcttcttgtacagcgtgtggcaagtcatggttagtagtcatcgtagttgacgctggctccatgcctaaagccgtaggggctccggggaccaattgcagagtcttcatcatagtgacgttggtagtaatcgccatagtattcatgtccatttcgatctctgttaagccaataggtgatgtcatcttcaaatttcgcttcgtcaaagcccatgtagagaaac

SEQ ID NO: 791 - DNA, 346 bp, Homo sapiens
tgcggccgccctccgtggaaaaccggccaaagatctcagccttcctgcccgcccggcagctctggaagtggtcggggaatcccacacagcggcgtggcatgaaggggaaggcccggaagctgttctacaaggccatcgtgcggggcgaggagaccctgcgtgtcggggactgtgccgtcttcctgtcagctgggcggcccaacctcccctacatcggccgcatcgagagcatgtgggagtcgtggggcagcaacatggtggtcaaggtcaagtggttctaccaccctgaggagaccaagctgggcaagaggcagtgcgacggcaagaatgcgctgtaccagtcctg

SEQ ID NO: 792 - DNA, 443 bp, Homo sapiens
gacagacattcaagacaaactgtattggaaatacaataatgaattttggcctgatagccctcatgctgtcttatagcaaaacactaaaattcatgcaacagagaaattggtgacatgaggactttttctccagacttcctggggaaaaactgtgagaatatacttttttcttctgtttgctttcgaaatgcattctttcttttgctgactttcccaaactttcccagtcgtttctgatgaaaaattcttcaataggaaaagaccaggtaaacttacatgaaagacatcaagtatcttttgagctccttctctctgccagaggagcaatcaactggattacacaaaactaccttcacaactaaaacaggtagaattggaacaggaattagttgtcattaatatactcgtaataaaataaagcttgttctgaaaccacaaggggt

SEQ ID NO: 793 - DNA, 453 bp, Homo sapiens
ttttttttttttcattgtacaatatctttattaaagaaatgcattccagcaacactgtcagcatctttattaccaaagaaatacataactttaacagataatctctgtatcttagtttttgcctttgcaaaacaaatggagatatatcaactctcatacaattctaaaagcattgtgctgtgctgcctcacaggggtacgttcccagaggtttctctctctagagcaatccctaataggacaattgttcactctgaggcttctggcttcttatctctcctctcttggggagctgctgcttctctgtaggttgcttccctgtgacgcagggaccatagtttctgctctaataacaccttttccactctgacgtagctgagccatacactacattgccttagtcctgttcaccctttggtgattctgttccatttgccacctggcctcttcctcc

SEQ ID NO: 794 - DNA, 422 bp, Homo sapiens
tttaacaattgcaaagattttatttagcggctttctgtgcttggccttagaaacagagttccgtgcataagggcaaatttttgtacaccttttcttcatacatattttacatacccttttattgccccctttttcatattcataatattggattccccactaggcacataaatacatttatctacaacacctcaaaaccagaaactttaataatatctgtattattttacttggtattatttgcatttccacaccatttaaaaattttagcttgcaccaagcttcacttgctttcttaccattaaaagatttgaagggaaagggaaagatgaaggacaaaacccaaaacttcaaaatgcaatgtactatttgataaaaatggagatctaagggcaggtagaagggtatagaagacccatctg

SEQ ID NO: 795 - DNA, 514 bp, Homo sapiens
agaacaaaatatatggtatttattaaacacatgtgacataggttataatatcaaagtagagcatgcatgaacagatgattcattcgtttaacaaaaacaccaattgatactgagaacactaaattattaaatttccaagacatataaaattctctttaagttaaagtgagaaagaaaaaaaaatcacaagttgaataaatacagtgatttcagctggtccaatgaaagcataaggcacaaattaaaccaagggactagcgcatcagaatgaagcttgtctggcccacacaagtctctcagtgtggctcccacgaccctgcacagatgcttgggaccaagaggaaagagcacctgcaggccgggaaccctcccttccaggttcaagtttggctgggtgcccatgcttcttgtggacaggcctctctgtatcagagaaacgctgcctctaatacttttatgggtaaacaaaaccttcatgctctatcaaacaatcctggcatgaataacatgaaac

SEQ ID NO: 796 - DNA, 401 bp, Homo sapiens
ttttacatttggaaaatatactttattcaataatataaacaatgtagtagatatatttgattatttaataatcattttaagtttattgtacagatgcacatgtcaataattagtgtttttcagatgggatgatatacattctgcttttatttttatctctttggtaacaattattgacagaacaatgaaacaaagataaattgttttacagttgtaatacccttgtatggtaattctcagcctcttttatcttatattctactagcacttacatctaataggtctcaataaagtagaaatgtaaaagtatgtattttcagaaaaggtcatatttcataaagattctgttactatgttagtcatttatcataagtgttaagtctaagaaaagttgtaataga

SEQ ID NO: 797 - DNA, 408 bp, Homo sapiens
ttcattttgcaaatttaatgtaactctgataccaaaatatgacagcacacagaaagcaaacaataaagcaggaacagcaaacagatttttccatcacatgacaccctcagctgattggccataactgccttgactgctgtgtggacaaagattccaaggatgtactttggctccatgggaaggactactgcaatttattagcggtatctgtaaacatggggaataaatctgaaacctcactagccatacgagaagccacaggcaccaagactggcggctccactgccaaagccagcactggtgctcggtccaccaccaaagccagcaccagtgtttggtccaccgccgaagccagctcctgtgctcggtccaccgctgaagccactggtgcttggtccactgcagaag

SEQ ID NO: 798 - DNA, 175 bp, Homo sapiens
tttagaatgttcatagcagctttattcataatagccaaaactggaaacagcccaaatgcatagtaacagaatgagtaatttatacaattcaatactgtatacaacagtatgaatgaacgaactacaacatgcaacaatacagatgagttgtatagacatactgttgagtcaaaga

SEQ ID NO: 799 - DNA, 478 bp, Homo sapiens
ttttcccagtttcaggtacgtctttattagcagtgtgaaaatgaactaatacagactggaagccttgtgacaggaaaactgaacatctgagacatctataggaaaaaaagatctgcttacatccagtccttggagttccagtagactgatttattcaccaacagcattgctcctccagctccattccaggagacaggcaccccagaagtagcaggactggtagacatcactagtattgtatatgtgttgtgcatgtatgtgtgttgaagaagaggatggggaaaacaatgatggtggtcaccaggtaagatgggacccaggaagggattgcaagtccaggccccatgaacacccccaaagaatgcccctcctcttggaaataaaagtggttctggatccagggagatcaacagttgcaagctgatattaagagttgtctattggatctgttctaagggatatgttatgtgaagccaat

SEQ ID NO: 800 - DNA, 408 bp, Homo sapiens
atcttaagagtctttatttaacacatatagtacacattttcagtcatttcatcatcatccaagtacattaagatacatacccatgtatattacaaggcttattgttcactcatcatcttccctttctactttaccttctcatttcttgaagtctctattctcattaatttgttatttagttacagtcctcttttcagtttcttcagatggggatatgcagatgatagattcttggaatcctttctgcatccctttcactctggcaggtgaatgatgcttggctggaaagagacttcttggttactttccttttctcttaacaggtatagatatgattccactgtctgataccagtccaattcttttcccattgcaaataacttctttctgtctggaatcttatatatt

SEQ ID NO: 801 - DNA, 110 bp, Homo sapiens
gatccctgaagttgccctggtctctgcaccttctaaacctagttcttaagagctttccattacatgagctgtctcaaagccctccaataaattctcagtgtaagcttctg

SEQ ID NO: 802 - DNA, 223 bp, Homo sapiens
cagaaaactaaagcagcacctttattttatacatacaaacagtataaaatgtttattaggtaagagctgtgttttstttacaatatattatatybscttcavrcgccaatgcaaaavvgttcatacattatattccctatttcattgtgtttagaatatattatattgtttaaatgmcactaccacagtgtaatttttttttttttaatactgaatctctgga

SEQ ID NO: 803 - DNA, 293 bp, Homo sapiens
cgttcgttaaatctttattgaygcgtggacactcctbcccctccagccccgccccccagccccagaaatactagaaagcgcaccataaaacgagggcacgagattgtbgtcccattcacgacggagctgagggggaggtgtgcaggttccagcctagatgttcaggattgagatgtgggtcgtgaaaggaaagtgggttttccgggatgtgggggcttttctvagcactgggtccactgacgctgctgytcccaaggggatgctaggacyccgytcaggcaggggtgggctcg

SEQ ID NO: 804 - DNA, 517 bp, Homo sapiens
ccaaatttcaaaaagttttattttgaaagaatgagagaaataaaacagagaggtatcaattaccaagaacaattacactgaagaaaacacaataataagtactctcccacacaaccccccccatttccccatccctggcacaataatattaaaaccaccaaagcacacctaacaaggaaaaacaacagtacgtaatgaaaaaagcaaatgtccatactgctcagtccaactaacccttatgaaatgtccttcccccagctaaaccctacccactggaatgataaagawatgtagagacaaccctaggggagacttggaactctgcttatactagcaaagctcagtgaagaatcagtaagagtagtgaatctgtttggcagtgaacactggatatagcttctttttcaaattttggatgattgcagagaacaggtagagtttgaggctcacagacttctaacaggactgatccctgttccctcaaccgtaacagtggggbagctgccaaatcctgggt

SEQ ID NO: 805 - DNA, 229 bp, Homo sapiens
gcataaaaaacacaatgvtttaatttctaaagcacttatattattatggcatggttttggvgacaggttattatagtccacataggtaagtatgcagtgcttctcatggaaaaaatgcttaggtattggccttttctctggaaaccatatttyyccttttttaataatcaactaagatgtatatgtaagacrgcctcatcttttgatttttaatatacaagatgctttc

SEQ ID NO: 806 - DNA, 293 bp, Homo sapiens
gaaacttcattaaggttttattcagtgtagcaattagtgtcttcaaaaataaagtaagtggaagcagaattactttaatcaactaacaagcaataataaaatgaaacaaaatatttgttttctgtgtctcatttttttgttgtattttttatattttttatattttgagacaaacttttgctcttgttgcccagactggagtgcaatgacatgatctcacctcactgcaatctccgcctcctgggtgcaagcaattctcctccctcagcctcccgagtagctgggattacagg

SEQ ID NO: 807 - DNA, 263 bp, Homo sapiens
  misc_feature (1)...(263): n=a,t,g or c
aagggttgacttagtttattgattacctgggacctaactcatcctcacatcgccaggtgaattccccaaaactctcatagtgctggttatagtggtagaggacccggtgtaaggtgggggaacccagatccaggagggtgttgtaggcggtctgctgctccttcccactagtgtagccattgaagagattntagatcttgtctgctatttcttgagccttgacatcatccaccacggggcatggggtcttcacgatcacgtcg

SEQ ID NO: 808 - DNA, 289 bp, Homo sapiens
  misc_feature (1)...(289): n=a,t,g or c
ganttgnnccnnngtataaaaatgtacagtggttttattgacatgtacattccaatatgtttacagctgcaagataatgaggcacactcagtattgcacttcattaaaatttcaggctcaaacttaacctagaagtttaaatgaaattgcatttgtaatttagtaattcttatacaggacaaacattgatatgtttatatacagtgtgatacttattacatttatatgctgtcctaacacaatgtttttttttttttnaaataacagtctaggggaataaaccagaata

SEQ ID NO: 809 - DNA, 402 bp, Homo sapiens
  misc_feature (1)...(402): n=a,t,g or c
gagatacaaggttgaataaaatacagaccctatcatcaaggataattctagtgacaattatatttcacattatttctgtcaggtcttgataatattttaatcacaggaaccaccatagcagtccagactcattttattatttatcatctctcagtaactgctccgacagtgggcaacaaagggtattgaatacttatatttcaaattttaaaatttatgataatttgggagggaggtgaaaaaaccttactagggaaagacaaacattcattattctacggtgtgtgtgaggctcatgtctcttactcttggcatccgggggnattaaggtacaggccctcngtgtaggggngttcccttnaagggaaaccacctttaatggcatttnaccccccggcacat

SEQ ID NO: 810 - DNA, 460 bp, Homo sapiens
  misc_feature (1)...(460): n=a,t,g or c
ttaaagacagagtttcgctcttgttgcccaggctgtagtgcaatggcgcgatattggctcactgcaacccctgcctcccaggttcaagtgattctcctgcctcaccaagtagctgtgattacaggtacccgccaccatggccagctaattttttctatttttagtagagccggggtttcaccatgttggccaggctggtctcgaactcctgatctcaggtgatccacctgtcttggcctcccgtgctgggattataggcatgagccaccacgtccggccaaattttacttcttaaaagtgcttttctctcagtgatatcaaggtcttctgtctactattataaccataagcttctttaggcattaaggagggaaaatgtttaataaaatgtaattaaactgggatggaatggtcagtgtatttaaatgtaaatatacttaaatgtaattaccggggnggt

SEQ ID NO: 811 - DNA, 383 bp, Homo sapiens
  misc_feature (1)...(383): n=a,t,g or c
catgtttatttgaataattgccccattgcacaataaataaatccgctgagtgtgtttgtttgaatgtttttacatgtacatgggatcacatagtcaaataaatgcagctgtgtttattacaatgtgtggggctccagatatacacacacttgtttgngtggatatccagggccctacagcccctgaatggcctcacacatcttggagcaaaagcatggttaacaatttttcagttcaaatacatgtaaacttattattgggcagtctcctcaaatttgtgactaagatttgcttttantaaggcttacattantagaaagntaaaaaatgacctttttaaaagttatcngattgtgaaaagtatctaatacatttatncataa

SEQ ID NO: 812 - DNA, 616 bp, Homo sapiens
  misc_feature (1)...(616): n=a,t,g or c
aatgattgtttttttattaaataatttctccaaaatactgaaaataacaaataacattcaaaaagcattcaaagaaaacaaaaacatgtcctcattttatttggaaataaactcttgttgtaggatagaaaggaattagtgtattattggcaacctatgagattctgcactatttacatattgctggtacctctatgcaaactattgccaaacttctgaagcttctgttgtcattcaactgctgggggagggctgtatgtgaaagtaacccgctattagatggtgcctttaaggatgtaagcaccaccttcctgtctcctgtttacatactttacatactttagtggcaaggggagattgagtaaactaaacctgcgctgacagactcactgttggaatgagaagggtggtcagaatgggaggcagaggataacttcctctgtaatctcactgggtcagagcctcagcaaccttcactggcacacaggaccagtctccatctccctcttcccctaagagcaaactggttggggttctgagaccatcgctgcctggtatgaatgcntggtacaactataatcctataggtatccatcagcattctttggnccccaan

SEQ ID NO: 813 - DNA, 461 bp, Homo sapiens
  misc_feature (1)...(461): n=a,t,g or c
aagaaanacccatttttttccttaaggacttactagccaaaatttcttaaacttcgaggactctactagccatggccgagccattcttgtcagaatatcaacaccagcctcaaactagcaactgtacaggtgctgctgctgtccaggaagagctgaaccctgagcgccccccaggcgncacggagcgggtgcccgaggaggacagtaggtggcaatcgagagcgttcccccagttgggtggccgtccggggccggacggggaagggagcctggaatcccaaccacctcccttgcagacccaggcctgtccagaatctagctgcctgagagagggcgagaagggccagaatggggacgactcgtccgctggcgcgacttcccggcncggcagaaagtggagccgacgcccgaggccgagctgcttgnccagccttgtcatgactccgagggcagtaagttgg

SEQ ID NO: 814 - DNA, 368 bp, Homo sapiens
  misc_feature (1)...(368): n=a,t,g or c
nttgcacttggggtaataggtttattatctctatatacaagtaagcatttattgatgtttgtcaaaaataagagacaagataacaaaaactattttagcatgaaaacgagatagctgcaatagactaatactgagcttaaagactccaaaaagagcacagaacctgaaatgacagttttcaggttgtatagttatccagacaatgaagtcaactatacaaggcaagcaacacatgacaataaaacaccatcaacagtttcccactggaggatggagggaggcttgctggggcctgggnaactangtgggaaaaatatttaaaatctcataaatcctccgtatcctttttttccnatttcagggaactt

SEQ ID NO: 815 - DNA, 454 bp, Homo sapiens
  misc_feature (1)...(454): n=a,t,g or c
gaggaactattttctttattttcccaaggatggtacatggctgtgcattnctagatgcaaacgtacaatgcaaattttccagatgcaaattgggccctaatgccgtatctgttgtgtgttaattcagggctcaatgttctgcaaaaccagttgagaggggctggttaagaggaatacatgaacataatgaggagaaaaacaaaatatatatatatatacccaaacataatttccagggggaaaaaaacccacaaaatccaaaatgaaaattcactggataggattcatagcagattaaacagcagcaaaagaaatggttatnggggatcgggtgtagtgcctcacgcctgcaatccaaacactttggggaggctgaggtgggcagacagcttgagtccaggagtttgagaccagcttaggcaacagggcaagacctcatctctacaccaagtac

SEQ ID NO: 816 - DNA, 599 bp, Homo sapiens
  misc_feature (1)...(599): n=a,t,g or c
tgcttattgatttttttaagtctgagggaaattacccaaaatgtgtcattccttaacatttaaaaatatgttacataaaaatgagcaactgtgataacaaataaaacttggagagaaaaaagttggctatttccttattcaaggagacagagctaccagaatacatcaagatagcgcacaaattttttaaatccactgccacttctgctgaaacaaaagtcaactgataagaaaattcccattcaaaacaattttaattgtactgttaactcttcctccattttttaatttcatgaagtcataatccaatctgagttggtctgttgggcattagcagacatagtcactggagaggagtgagatgatgtcagagcatggggcacagtatttataaatgtctcctttaagaaagtgtaagtagtatcaagttcagctttcaatgggtaagaaatccccaataccagttgtgtcagcaggaaggaggagctcttgaanggatggagagatttggatgggcccgtgatccnattggattggtnaacctgcattttccccgttaacaagccggtgtggaagtccggtttccaaggctgccatnt

SEQ ID NO: 817 - DNA, 491 bp, Homo sapiens
atacaagaagtattttaattattacaaaaacaaaggaggcaggtactagaaattctgcatttcatagaagagtaaaactttgttagagatattttcatgatcatctacctgcagacaccattcatttaaaaagtcctagtcaagaccattaagcagctgcatcttctacaacattgaaaaaaaatccctagagatttaaaaaactgaagaatttcactatctttaaaagatattatattttagtacataaagctattaaatttctctgtgtcaagagcaaaacattaccccttaccttgcttcatcattggaaggtggacacctgatccagcaatactcattaactgctaggtagatgacccatgttgatggcagtaaagccattttacaatgaacttatgaagtagtaacactagccaaacacacagagacacaaataccaaaaatgatgtgtttagtatacacaaatagctatacttggggcatgggtt

SEQ ID NO: 818 - DNA, 417 bp, Homo sapiens
  misc_feature (1)...(417): n=a,t,g or c
caaaatgaaaaaaaatttatttcctcagtgttttatccactgtcaatactgtatttttgatgcaatatatttgccaaaagaactcagcttttattttccattttaaacaactacaatatttacaagctgttcagaataacactcagacacacacacactcanagacacacgtaagtacatatgtccttatctctggtttatactgaatgctggtaaaggccatgaatactttccagagcccatgatcagaaaaggaaaacccattttcctttcttacgttcactttcctagaatcattttcaatattcctccttccatttcctcatgcagagtcattgccagacttgtataggtttaatcagtttttacattttacttttacttaaactataagcttttaaaaagcataagcagaca

SEQ ID NO: 819 - DNA, 444 bp, Homo sapiens
  misc_feature (1)...(444): n=a,t,g or c
gcaaanaatagcagccttctattttaatgaattttacacaaaatgatcatcctaattgctactctcttttcaactacagtgcttacagagaatcattaattttcagattaacaccatttcaatttttattcttaggcaactctattgacactttccagtgaaacagtaaagaacatagagcaaaagctttaaggtaccatacttttgtatggtaaataagtatgaataccaatctaagcctcttaacaatgtgtacaaggttagtgctcaaaccacttcactagagtaaatattaattttacgtgtgataggcaaatgtatgtggagggttagggaacaacttattaccatttatactaatggttcaccttctataaaaacagtgaagcttgttacatacgcacacttgtttgctgcaatgtttgggcaaatgatttaaagggg

SEQ ID NO: 820 - DNA, 595 bp, Homo sapiens
  misc_feature (1)...(595): n=a,t,g or c
gacaaaaataatcttgtttttattttagattcagatttcattactgcactcaaacgactacaactgggcttggcgttattatacaatccaaactgtttccatcagaaacgctaagactcagtgtgcaatgattgttattaataattagctccttggtttcttgatagaaaaaggctatcaacaagcatttgtttatccacaacaaaaagtataattagcttatcccacttagtaaatcttgtatgcatgccaactcataccaaactgctacttttacaaaaaaaaattgcaataatacagttcatttttccagtcctttttgcacaaaatttatttacaatgtctacataaatgctccaaggtgggactatgaaaaaatacacacatgaccgatgctttgctcagaaataaagtcaacatattanaaataaatcttcagtctatgttttagagctgcttaaaacaggaagtgatgtataaggtgggtggttgtggcatgggggacaatggatgcctggatgtgacaattagggcttctaaacacacggnctttgggtttccatgcctcctnctaccagtctccttaagaccctgc

SEQ ID NO: 821 - DNA, 341 bp, Homo sapiens
  misc_feature (1)...(341): n=a,t,g or c
taggttttcaatacactttaataaaatagtgaaaaataggtatctctaggatagtgaactatgggactacaaagggcaggacgatacattttacttggtgaaattcgcttaacgcttactcctttctcaaagcgccaaccaagaatttggctactaaataaagaaaaaagctgttagtggctctttatccngccacgatanggtgctctgaaacccggtcctgnaagacattcccttggcccacattttatagnttccttctcagtctcaaggnctgtagtctactgttcacactcgagnctctcgcaaaatacacaagctcaaaagctcatggcntttct

SEQ ID NO: 822 - DNA, 405 bp, Homo sapiens
  misc_feature (1)...(405): n=a,t,g or c
ttttacattgacaggtttattcttaaagcttgaacaaatacatctttacacacacacaagttggtaaaaagtaagcccttactgctttgttaaaaataaaacccatacataaagctttccggtcaaattcccgaaacatgaaaacatcacatttctacaatacatctgcttttttgattcatgtgtgttttcaacacaactcaacaactcattccgatctacccaaacaaagagaaaactaacttccagaccatgaaggaaaaaaaaatacatgcctcttataactgttaaagacaagtagctatagaattctngaaaattctcaataaatagttactagtataaaaatgcttaactccatatagctcacctttaatccaagggcagtaccagttatcgccataa

SEQ ID NO: 823 - DNA, 507 bp, Homo sapiens
  misc_feature (1)...(507): n=a,t,g or c
tttctattaatctttatttatatgatggttctctggaaagcacttcattttaaaacctgtttctgagataagtagcataaggcgcatttgaagaaatactattgttgtatcacagagaacttccatgccttgaaatcatttttttcagagtattattaataagatggtctagctatgcagagcaaaaaagaaaaaaaatcttcaaaagccaagactgtcaggcacatgaaggtatgcataaactgtcttcacatttaattttgtatgattcgggagatacctccatgtacatctaaccaggtcaggcagcataagtcctcagtaaccctggggtgtgccggcttcaagccaaagtattctgttgagtttggtttgtggagagacatttgaaatgttgcttcatagcttccattttctggagaagtggaagaaatgaagcgtnaaaaggcctaggaaatcctcgtcttctccaggctcttcttctccttctgcagnttcctcctcctc

SEQ ID NO: 824 - DNA, 414 bp, Homo sapiens
gtcccacaaggatttcccagtttaatatggaaggcagaacacacatacatgaaaggccataggaacaaataccaagcaatacgtaacataaaaataaatgtacaatgaagcctcactgcttcaaatgctggtaatctaatctctaagataaaaaatatgttccctagttttgctaacaccattcatttacgtaagagaacaaaatatttcaaacactttagaggtattattaatatatacatatcaaaagcaatatattatttaaacaatttcaggcatacctcattttattgcacttcgctttattgtgttttgttgacattgtatgtttttcagatagatggtttgtggcaacctgtgttgagcaagtctactgggcaccatgttttcccaacagcatgtgttcacttcatg

SEQ ID NO: 825 - DNA, 440 bp, Homo sapiens
atatgccccaaacatgatacttatttattgataattcataccctgcctatttctcaaaaatgacttgagaaaaactgcacaacatagcgacaatacacatacagaaattaaaagtgaaacaggaatacatagagatataacacacaaacatcaaactatgattagatcaggtaaatgagtgttctgaactgctttggtgtcacagaggcatttaaaaatatagtaaatactacagatccttgtcccagcaaaattccttcaagcacatacccagctttgttcgatccctaggggtctgcaactcctaaacccctacatgctaaagactcctaggcaggccatggacccccagattaagaactctaaagtaaatgaaagtcagagaaaatatgggatttgaataaaataatggaaaaaattgagttaacaaatagaactgg

SEQ ID NO: 826 - DNA, 451 bp, Homo sapiens
  misc_feature (1)...(451): n=a,t,g or c
attattaaaaactcatataggatgctttatttatagatacacagttaactatgtacaaaataaaaaaaaggaaaaccaatctactaaaatatattaactctaagaaaatcagatcttattcctgtttctccatactaggcataattattttcaaagctatacaatacgaagtttatcagtcttatctgtttgccataacatcattatgaattttctcttttaaaaatggcaataacaagtgacttatgttctaataaaatttggatcacagctagcaaatgaaagactatgagactcaatcacttttaatcattaagtttgtgttagtctttattaaaaacaaaaaataactaaaatttcagacagcgatgtacataatatatatnagaatatacccaaaaaagtaaatttctaccacccctcgcacagccggaatttccatgggggtatt

SEQ ID NO: 827 - DNA, 437 bp, Homo sapiens
  misc_feature (1)...(437): n=a,t,g or c
gagactgcatagggctcggcgtggtctggaaggaggtaggaaaagaatgaaatccattcccagggactttctcaggtgctgatttaagataaaatgcaaatgaggtagacacagttcctagcctcaggaaggacaaagagaaggggcaggtttggataatctatatgtcagatgacaatttattcaacgaatattttttaaagtaccaactgctagcagaaccctgcactgctcacagcaggtggagcaggtggcagatttcagagtcacttgctgtgctgtgacttggagccaagcccccgatttcccactggacagagataatgaacacctagtttcttcatccatgtggactcagcacacagtggtatttggatcacnaaattatcctggtactataggcgaggtacaaaccctgttaaggttgagaaggggca

SEQ ID NO: 828 - DNA, 463 bp, Homo sapiens
  misc_feature (1)...(463): n=a,t,g or c
cgttgtaattatttattctgttactggctgcttagtgtgacatatttgatgttatttcaattgtaatactcttcaaattggaacactccttttctgatattcttagcaaatccctcttttatttttgccacttgttataatatctctaagaagttactccaggaccgggcagtagggattactgattcagatgggtccagtgactagaatatgagtagaaagtgtgaggtctaatttgaacctgtcagagttactgttgcctgcgctggcccaaagtgcagatttttagtcagcttgtgataggccaggtgttttgtctggaccaggagttatctttgacttgtagctagaataaggatcctgagaagtcaggtatccacttgatgtccttttatttgacttgttaccattagtactctcctgggatcaaggctgccaaccgaacctatancccagatttccc

SEQ ID NO: 829 - DNA, 355 bp, Homo sapiens
ccatttcaatttgtatctgctatcctatttttttttttttgtatttttgtattttttactttcctttatttgcaataaatggttgtggattacttctggaaagcagtaaatcctaaaattgacccatagccatttattcctaagaacataaaaaatgcaaagatctaaaaaattaggagacaattcaaaaccaatgatataatttaaatatgttttgtgaagaacaggggtgcatgatcttgtttttcatatcctctcatttgtaggcagaatgtgtaaatcatgtacaagtgaaatgtatcttctttggtatgataaaaggcaaagtgtcagcttggttgataaagcagataga

SEQ ID NO: 830 - DNA, 466 bp, Homo sapiens
  misc_feature (1)...(466): n=a,t,g or c
tctccattcaattcatatttaatagaccaccatctcttctgccttcatcaggaaaaaaacaaaaacataaacaaaatagtatctgcctatgattaatagtatttaattacacgcacttttgtttgagtttacttccttgctttctgaaaaaaacataggtatttagacactagttcatgatgataaaattaaaatttagttttacaaacaaaaattgaaactgtcatttgtaggaaaaaaattcaaatttaaaattgttatttttcactattcttagatagcaagagaagtaagaatttctttactngngatttatatcacaacagaattttttccttgacaaaggaccttttaaaaatcccaggaaaggaccacaaaataatcaaagactgcacattgtaaataaaacccttcagctgttattgaaacataagtataattacacacaaggaaaaggtattataag

SEQ ID NO: 831 - DNA, 416 bp, Homo sapiens
aatgtacatcatattttttatagaagtgattatatcacaaagaaaaatcctgccaaacaactacaaatcaagaatctgtgggcaaaaagctcaattcatacaatgtaaacacattgaaaaaacaaatgcaaaataaaaaaagctgttgatacatcaccttgaaaaattaacacaactaaattaagggctatagaaaatgtgttcagcttatatatcatacacgtcatttaacttgaattttacaatttttaaactaatagaattcagatttattacttgaaataatggtatacccagctgttcttcataatggcaagcatattccatatacaatacaatttatttagcatagttttatactcttaagtaaaatatgttagtggattaaaagcataaaggaataaatatggcccagc

SEQ ID NO: 832 - DNA, 473 bp, Homo sapiens
  misc_feature (1)...(473): n=a,t,g or c
cgctctttactttttattcactcacacccaggttctttccacaaagggttcaaggtagttacaagaattactactgtttggcgtttgctgaaagaagtacgtgagaatattatatgctttagaaaccacagagtcgaagcctgtcatcgtcctcatagaccaatgagtagccacacgtacttgtttggcattaccaagtgtccgggcaaggccgcagcctgcagctcaccagccgtgctgctcggcctgtgcacgtcaccggctcttccctagggtagcttttgcttgctttctcccacgtccatcctctctctctctggactcacagccagccaggtttctagccttgtcattcctaaaactactgcctcaagccaggcggggcgcacacaaacttaaaatgctaatctccacagcggtgtctggactaatgggtgtcccccaccgtgggaatgtatgtgagctaaagacan

SEQ ID NO: 833 - DNA, 238 bp, Homo sapiens
caaagaacaaagaagtttatttctttcctatgcaacaactccaaggtcaacatttcaggccatgggtagctgtgatccaggaggtcatttgggaagccaggctgatagcagttctaccatcttccagatgagatctccaaggtcactctagtcttcacagttccgcaaggtccgcggcttcattcttgaagtcagtgagaccaagaacccaccaattccggacacacacctggattca

SEQ ID NO: 834 - DNA, 159 bp, Homo sapiens
gcaataccacaaatttattataatacacagggaaaaacaaactcaaactttgacaacatccacagaatgttccagtctttaaaaagttagcagaaataaagggtaatggaaagaatataatctcgtaattttatacttaaggctgtaaatggcaaagtc

SEQ ID NO: 835 - DNA, 183 bp, Homo sapiens
ttgtctttaaaacagttaaggtttaatagcttttctacattacaaaaataaaatacaagggcacacagtctggttttagagtaggatttttgtctttttcttcccttaagtcaaaatatcaaagggaaaaaccaaaaggaaaagataaccatggttggttaaagtggatgccacgtgctctct

SEQ ID NO: 836 - DNA, 432 bp, Homo sapiens
  misc_feature (1)...(432): n=a,t,g or c
tttttttttactcagaaaaataaattaatgaataagatttcctctattaaagttttttcttggtttttaaaaaagtgacttgcacatatacaaccttttcattagtaaaattgcttagttcatgcaatcaaattaattatataagtatttcatggcattctccaagctctactacttgaacaggtctgactgaggcattactatgctaatgtactctgatcccaaatgattgtctacctaaaaatagaacaaatactgtattttctggaataaaccaataattcgtatggttttaggtactggtattaactgatgacccaagtcattaataaaatgttaaaattatattcaacatctaattactgttagggcaaatttgtaatacaatctaaaagtttcttaaantggttaaaaaggtttnggtgcttncgg

SEQ ID NO: 837 - DNA, 459 bp, Homo sapiens
  misc_feature (1)...(459): n=a,t,g or c
tttttttttttaaaatgactaatatttattacacaagtacttagttacacttatctgaaaattataataggacaattggtgcatgtcacattcatattactatccatataagaacaaatacatttagtcaactatatcaggataacacacaaggtttttgtttgttttaggcttctcagttgaaagaaaacatcgagttaaggnaaaatcaatttccagtgattaagntattaacaatatnaaataattaaaaattacttctnaaatgtcttacattttggacaactttggaattatacttacatactnaatatttcccaaaaatgcatttaggttacagggggtcactggtcgggggtggaaaatattatttttggaaaggccttttttaagggtntggttntttattntggcttttaacctcctttnctttnttcctgggggccaccggggcttcgg

SEQ ID NO: 838 - DNA, 289 bp, Homo sapiens
  misc_feature (1)...(289): n=a,t,g or c
ttaacaggagacaggggttttattattactcaaatcagcctccctgaaaatttggaggctagggttttttaaaggtagtttggcgggcaggggttggaggtagagcaatgtcatttagcttgctcacttccatctgccagtttggnagcttcttggctganagatggcgccgggcatgcttggtcaaatggtcactcctcatgaaccgccggtcacacatggggcacgcaaatttcttctcacccgtgtgggttcgcctgtgtctggacagttcancagaacgggcaaa

SEQ ID NO: 839 - DNA, 399 bp, Homo sapiens
  misc_feature (1)...(399): n=a,t,g or c
acacgttcaggggcctttattactgcggggggtgggggggggcgggggtggttaggggaggagggagactaagttactaacagtccaggaggggaaaacgttctggttctgcggatcggcctctgacccaggatgggctcctagcaaccgattgcttagtgcattaaaaagtggagactatcttccacgaatcttgcttgcagaggttaagntctgtctttggctgttagaaaagttcctgaaggcaaaattctcatacacttcctaaaatatttntgcgaagagtaaaacgttcagcaaacacattnatttggaagttccagtagttaatgcctgggcantttttttgcaaggtgaggttttgtctaaaggccccancagggcacaattatctcccng

SEQ ID NO: 840 - DNA, 423 bp, Homo sapiens
  misc_feature (1)...(423): n=a,t,g or c
tgaatattcaagaaaggtgaagtttaatttgcatataggcataacctacacctcacttggcaagtgttaggccacagcacaaacccctctgtccaatcacaaatgtccacaaatttgcaaagtaactggacacgaacgatatgcttctcaaactcacacacatattcgtccatcacacacacactcaaatgataaagaantacattgaaatcctctacaaaagagatctgaggacagtantcagatgacctcatgtgcggacagcctnttgcagtttacagtctaatccatttggtcctcacantagccctgtgaggataagcagcacagggattactnttcacaccgttttgcaggatgagggaaactgaggctcaggggatgtgtaaacaccagcctaaggttttccagttgggagactgg

SEQ ID NO: 841 - DNA, 440 bp, Homo sapiens
  misc_feature (1)...(440): n=a,t,g or c
ttttacnnnnctttggattttttattaagttctgcaataaataataggtttataagttcaccctgttgttganctcatcagtggtcgccaagtaagagggtgaatcactcatcccaagagactctgctacctcttagctctggagggtaaaaagcaagggccagagcaaatacattggggagagggggagaaaaaaaaaatcaggctattttaatagccctcacatgccaagtgcttttgattcatcatgtttagttttcataagcttgtgaggtagataatattatccccattttatagatgagggaatttaggctccaatggggntaaataacttgtacaagnacacatactggaatgactgccatgagggagggaatgtgaattttgggtcacggggccaacaccctacactcttcctacccntgccacactgggca

SEQ ID NO: 842 - DNA, 211 bp, Homo sapiens
  misc_feature (1)...(211): n=a,t,g or c
tttgtcaagagccaagacacaggtaatgcacgacattgattgctgcattttaccttcaaaatatttgtccttattgactgggtctccttaattaatgtacacatgtcattagaatgcagacggaggggactcaccatgaatatctggggttgattcccagatgtgtgttgcttctctattgcaagcagattcccttgtccggatttacttc

SEQ ID NO: 843 - DNA, 510 bp, Homo sapiens
  misc_feature (1)...(510): n=a,t,g or c
tttttttgtgtggtaccttttatttagtcagtcttcatttaaatgtgtgcttttgaaatcactaaatatgaccttttcagaattcaattctcacagtatttacagtgaactttgtgcaaacaaatccccctttgtgcaaagggggagcttcctgctcccnttggcacattaataacttacaaattcagatcacaacaaaaccccagactctagttttctgtttgaaaggtactgagctgggataatgggttgctaggaaagagctaatgcaagcccaaaggaaataaaatgttttctttatcagaaaagaataataacaaggcctcactctccaaaggaaaacagacgtcccaagatgttgtggaacagtaattaagtaaccaaatacaattccaatggnttatttcaccttcatttnttatacttacnctcatctcttttaattaaataagcgaaaccaggaaagtgcanttcgaagggactctgaactgtcaggggaacgttntaaaa

SEQ ID NO: 844 - DNA, 402 bp, Homo sapiens
  misc_feature (1)...(402): n=a,t,g or c
tttttttttcctgcatgattgtttattcacatccacttagcaggctggtgagcagcgtgcgnaggaggcggcagaaccagaacctggacgcagganaaggacggggggcacgagatgggcacaggacgcctcccaatcaaggctgctctgtgggtttcagaaacgggacacccatcccttcaggcatccatagcgtgtgaactgtaggactacagggtgcaggtcaccccagagctcagcatccaaaccagtggggcacagcttcggcctcccacctgcccaggctcaccagagacactggctntgggcagagatgacctggagccaggatccaggaactgttgcgcacgggggtaagaggccgggcccancggcattgccatcgttggttgangcttttgc

SEQ ID NO: 845 - DNA, 396 bp, Homo sapiens
  misc_feature (1)...(396): n=a,t,g or c
gggcggagtcagatcggctttaatagagggagcctgaggaggctcgngcgtgcgggcncggccagccccctcctacttggctgcggctggcggtggggcctgggcgacgctggtgcggcctggatggacaggactccctcgggggacagcgcggacgtcacggcagccggatccacgccaggcggcaggcggtacgacggtggaactcgcgcgcgacgaatccgtgctcatccgggcgctcctcgtggcgcgcgtgcacctccacgtgttcgcccaccaccttgacagcaatttcctccggcgagaagtgcttcacgtctaagcagcaccgaaaagtngccggggtccgtcggnacctggggcgacgggcaagcgcacgctgggttgcncgcaggt

SEQ ID NO: 846 - DNA, 525 bp, Homo sapiens
  misc_feature (1)...(525): n=a,t,g or c
ggtttagcaaaattgttataatttcttttaaataacccacagacacccatcgacacttccaaatttacagagcaaaaaagtgatttgcagctggttcctccagggaattggccccgaagctggctcagttcacctccaggacctcagtctccgggaggccgaacttggtcttgtgcttgtcgaagagcttcaccagggcctccatgtacatggtgtggtacaggtcgatgtcttgctgggttgggtgctccagcttggggatggtgatgggctctcccacaacagtgggtgatgggcttggagtagggcaccagcccccaaggtgtcggaggaagaagaggcctcgaccatggaagatgcatggggcgaaaccaatgtatttctnggaacttcttctgggacccatcggccccaggagccctcctcgaagatcacctgctttgtacactttcattctctcccaaagggggtagatgggaaccaggtcagctcccatgacgcagggcccagttttnaaaaaaagcc

SEQ ID NO: 847 - DNA, 418 bp, Homo sapiens
  misc_feature (1)...(418): n=a,t,g or c
tcatttgtcttcacctttattgaaatacaaaatgttaagcattcaatctgtactagtaaaggtgtttcttgaagttgataaaggagggctgggctgcttgtggtttcctccaatatcacactttcatttatttcatacaccaccaacaactctcaatgcttaaccattttcagttgccaggaaagaggtagaaatatcttgtcatggacactcgttctatggtgggcatttggactgttgcctccggactttcaaatgcttgctgaaccttccaaaatacttcctctaggtggcagcgcaggaatatctctggaagcatgcgatgagttgtgtgatgaagatgggaagccccttggtgcccgtctctccctgggacacgttatcctgggntgtcaagattccccttctacaatccaca

SEQ ID NO: 848 - DNA, 455 bp, Homo sapiens
  misc_feature (1)...(455): n=a,t,g or c
tttttttngggctccagacaccccagagtctctttattgaggttcttagaaggcgagtgcaatctcagcctagggtagctgaaggaggtccagttcgtgtcaagtctgtgttcaggaagtaggtgcagagctgccctttgcctttcaccttgatgacaccccggctgtagcaggtgtagcccagggactgtagggcccatgctgtctcctcagtcacttggattttgccaaggactcctgtactctccatgcggctggccacgttcactgtgttgccccaaatgtcatattgcggcttctgggccccaataactccagctactacgggtccatggttcaaccccacttcgcaggcggaagttgttgaatgaatgcttgttgatgacgtccagcttagaccccagggccacggcaaattccaccaatagtgccaaaggtggctgcagctccgttca

SEQ ID NO: 849 - DNA, 586 bp, Homo sapiens
  misc_feature (1)...(586): n=a,t,g or c
gtttttttttaagattccacttctcagtttatttctgggactaaatttgggtcagagctgcagagaagggatgggccctgagcttgaggatgaaagtgccccagggagattgagacgcaacccccgccctggacagttttggaaattgttcccagggttcaactagagagacacggtcagcccaatgtgggggaagcagaccctgagtccaggagacatggggtcaggggctggagagatgaacattctcaacatctctgggaaggaatgagggtctgaaaggagtgtcagggctgtccctgcagcaggtggggatgccggtgtgctgagtcctgggatgactcaggagttggcctggatggtttcctggatccacttggtgaacttgcagaggttcgtgtagacacccggtctgttgggccgggcacaagggtaatctccccaggacacgagtccctgcagggagccattgcagaccacaggccccccagaatcaccctggcaagagtctctactgctttgtcaccggcgcagaacatggtgtcactatctgtctcnggtaanatcctcgcacttttctgactta

SEQ ID NO: 850 - DNA, 470 bp, Homo sapiens
  misc_feature (1)...(470): n=a,t,g or c
tagttatctttactttttcacacatttatgttacctggcttgcatcgtgggcctttgaagttccatatcccctgacagtaagggagatctgctctgagtgttgcctaagacatctacaaacaaacctggtgttttattccagttgaaaaaatgataattctgtgaagcatctggtcttctttttactagcagctctagtgtttgagcctatcgtttggaactgtggaaaattatttctctaagtagctctttaaaatggatccctgtctacatagagacttaagctatggctctttcctcagtggccttagctctaaatatgaagttctttctggactgaaactaagagaaaagtaaaggtcagactggtaaccccnttaagaatgttgancggttccttaccaatacccnaattaataaacngaaacctggaatgnagaatgcnggtatacagaggggaataaaagata

SEQ ID NO: 851 - DNA, 431 bp, Homo sapiens
atagtaagaacccaattttatttagaaaccagcaagcagcgtatgcagttaagaacccaattttattacaatttgtacataaatgcccaggaaaagttggaaggtgctacattaaggtgttaagagtcgccatgggggtggctgatgtgagaatttaaggtgttttctctttaggataaaatatcctaccgcccccaggagtgaccacgtgaggctgcataatggccgtctctgtgtctgcagtgatgtctgcagtgacgaacgcccggggtggtgagctctaatggccttctctgtgtctgcagtgatgtctgcagtgacgaacgcccggggtggtgagctctaatggccgtctctgtgtctgcagtgatgtctgcagtgacgaacgcccggggtggtgagctctcgactttagagagagaattgcatcc

SEQ ID NO: 852 - DNA, 363 bp, Homo sapiens
  misc_feature (1)...(363): n=a,t,g or c
tttgtcatttcatttagtttattagacaaaaatatatgatttagacaagttcgctgacgcgctatttacaatctgaaaccactctatatacagaaaaggggggaaagagacacaagcacgtgggggcatttaccgaacccgataatcgcagccactggagccgccggagaggctgggccacctggacgcgagctcgggaccgaagaagcccctttctgcagaaagcgacggatgcgagtccttgacgtcgttgtcatatttgtcctttacaccagtntgaaatatttgntcttaaantcccctcgnggccgaattctttgggctccgaggggcnaaaatttnccccatagtggagttcggtat

SEQ ID NO: 853 - DNA, 418 bp, Homo sapiens
  misc_feature (1)...(418): n=a,t,g or c
tgcaagacagaagcaagtgtctaattatagcaatttgagttgagggtttcttttttaaaggtcaacagaagccaaccttggtcacacaggtagtgagggaaggatatgttgtgggcggcccacaggcaacnattgttttcctgacagaaaaaaaaaaaaaagcgccatcagtaccgcctgtagggggcatggtgggggacagacacggcagaacgctggactcttgcttcagatnggcgcaccacaagcacacggcactctgcacaggtgccagtccaccaccagggccagcctttgagcacaccctgggtgcctcagactccggcagaaccacatttccatcgcacacccacccattaggggccaccagtcgagaagcaagctgggcaccaggcagctgctttgacatccagagaaa

SEQ ID NO: 854 - DNA, 355 bp, Homo sapiens
cttattggttaaaggcaatttattttgaaatgttgctttggttgtttgctttctggaaacatattggaacacttgtttttcataagctgtcctgacagtggcacaatcccatccatcttcaggccttttaataaggtcattatgaaatctgaatttctattaatactctggtgcattcatttcatctgcaaaagcaactggcacaaccactccttgccggtgcagctctcggagaacatctaatattgagtctagttctgtgcggaacttctccagctcacgattctttaactgtgccagtcttttccatttttcaacttctttgttttgctcagtttctactacttggtgtgtt

SEQ ID NO: 855 - DNA, 434 bp, Homo sapiens
  misc_feature (1)...(434): n=a,t,g or c
gcttggctcaaggtagaaaagttaaaattcccttttcttagataaactgattatttaaaactgaaaattaacgttttgacaactcaagagtgtctgacatcgctgggatcctggagtgctgagtgtggcctcgatggtggcttcactcctccacatctgggaggcacttcagtctcangnaatcaccccctttttttaaaagagaatggaggcagctactggaggccaagcacctccaggcactcaaggccctggggacagcgctactgactccactgcctcagggaggcacggtgctgctctaccacttcctctgggctttgtacctttaattgtgtctactctgcctaagtgcttaaataaagcattccattaagcaaaatacacatggagcggattacacactggactgcagaactcagatgtatgggatg

SEQ ID NO: 856 - DNA, 429 bp, Homo sapiens
  misc_feature (1)...(429): n=a,t,g or c
tttcttgtaacaaggcatttatttgggatgaggaaaggaaattgagcagaaggaaaactgtagtgtgacttttcagttaccttttcaaagattcaactaaatatctgctatttttaacttgagttccttttattacttctttttaaaaagtggccctgttgacacttgtgacctcaataaaagagatattttaatgttaaaatgtcttaaattaatgttgaaaataaaagtattttttctcatcccacctaaagaaggagggattttctttagcttcttcttgatcttgacagcattgctgctgcatccgtgactctggattcagtgtcagtgatacagtaggtgaccggtggacttgagctggggggctaggttatagcatggccaatggtaaataggttaatttggtccccgtgggttggacnacct

SEQ ID NO: 857 - DNA, 233 bp, Homo sapiens
taaacacagttcatttttagtttgtcgtggcaatacatggaaaaaaatcaggccactactaagcatctatagagtgtatctttggcaaaaatgtggacctgcaacaattcagatggttttctttcaattaggttcaaaaatcatggctctgtaaatttccaaaacttttaaagtcttctcatgtcttcttataatcgggcattcagaggtacgtgttggttctaatagctttg

SEQ ID NO: 858 - DNA, 403 bp, Homo sapiens
aatattaaaccaatacttaagttcctttactcattgttgagacagactattagtgtaggtgtactttcatttatatgttgtaccaatagaggttaaaagtatgaccctatcggtaatctttttaagcaaataaaactgtttggatgctttcccaggacgattggattgccctccaggcgtatctcttcaatgcggtcccggatgtaactggtgtcattagccttgcagaatgtgtcatctgtaattgaagctatgttgttgaactgaagatgaattacacgtagactttctggtaaattaagaggcacggattccagggcattatgggtccaagtacgaggaaggtgaggttattcagttttttgaatgcatttgctttgattcccctactcttgattttgtt

SEQ ID NO: 859 - DNA, 382 bp, Homo sapiens
  misc_feature (1)...(382): n=a,t,g or c
aaaacaaacgcatatgacattttacttaacagactggcaaaaatgaaaaaagaaacataatatcctgagctggcaggagcacaaggaaatgggtctcgtgctgatgatgaatgtgaattgataacagtttttttgtgatttgcgatacacnaaaattgaaaacagcacaaatgtacgttactctgggctcgctaaataggcactaaataaaacgagtcagtttcttctcccgagcaagtaaactagagggtagatccacgcgacccggagtctaggacacatcctcgggagtgaacagccacaattcacagacgatgtgtgcagccggggcatngaaaggcccaaggcaaacacaccacgaggtaaacgccgggactctgag

SEQ ID NO: 860 - DNA, 410 bp, Homo sapiens
aaaaaaaaaacaatatttagtctttctgggatatcagcttctgcctaaattgtgagaggtggtgtttcaaaagacacacgcaccagtggccccggggagagctgcattccaggttcctgtcctacgtaggcccctacgggtagctggggacaccagtctcctccactcacttggcaggagtcaggactgtccacctcttcaactggcacaaggcccaagcagcatgggggccctgagtgaaatggagggtcccacactgcttccaggacaggactgtcgggggctctcctcacccctgactggcccacagcagcaggctgctcctggcgtttggcagcagtcgtgatggggctgcagcagctggtgagtggagtcgtcgggcagtgtgtataagaaagagccctcgtccg

SEQ ID NO: 861 - DNA, 315 bp, Homo sapiens
  misc_feature (1)...(315): n=a,t,g or c
ttttttttttgaccccaagcacagctttattgacaccccagccaacaccaacactctttccaaccagcggtgaggggcccatgggngttngcctngaaggtggattgagggcctcggttttttgttgagtgatgacagctccatgttccttccagttggccctgcagcccctctatcccccagctttagccgctactcccagtggggcaggaggagcttccatttgccatctggagaccctggcagggacttgcccatccgatccanacaccagcaggggacctcgggcgctgcccctggggatganggggcant

SEQ ID NO: 862 - DNA, 434 bp, Homo sapiens
  misc_feature (1)...(434): n=a,t,g or c
gctcttgtgtacattttattatcattattagtaataaaccaataaaaactgaataacaaaggaaaaagctcaagataaataatttcttccttgtgaattcaaacacatgcacacacacacatcctcctctgtgtgtgttacttcctcctcacattctgtcctacggtacaaatagttacacaaaagtctacaaaacgcgagtagcagaccccagctgtgttaagctcaggctgattctcagtctagatcaccagcttctccacgctaagtgtacttgtggtttcatcctcttcatttgacccaaaatatcctgggaggtccagcatcctctgctcagcctcagtgaggccaaacgacgtattgtcatagaaggcaaactcagggtgagtggggaagcttgacacttgtcttttctacacnggttggtctctttg

SEQ ID NO: 863 - DNA, 413 bp, Homo sapiens
  misc_feature (1)...(413): n=a,t,g or c
gancattttaggaaaccttttattgcaaatgccattctgcatattgatttttgacagaaagtatcagaaatgcttctttcctgggaaaaggaatataaatgacagcaagacacattttagttgctactaaagaacagcattattttcaatcattttaagtcgctcatttaaanangcaagggtntaaaaacgggtttaaaggtgggagcctgcaaaagggtaattaattaaaaaagtgtttcctccccgggaaacagcactgtttggtctgnatcaaatgccgaagctgggaatctgattctggggtgccgtctcttcgctactgggagttgctgaccagcaggctgcccattcacgaaaagaggttggcaaggccaggcccccaggtngcgctggggatttctgggctgggc

SEQ ID NO: 864 - DNA, 274 bp, Homo sapiens
tttttttttttttttttttttttgcactagaataagtaatttattagtaagcacaatgacatcttttaggagaggtaggacaggtccccaaataagcagttctgtcttttcagtgttggagccatcagactcattgggactaggtttaaactggacattttgagaatgatgaaaatcctccaggtctgccaggaaaaacatttcactacttcatagtagatgatacctgacaccacctgctaaagagctaagatgacattccctaagtgcctag

SEQ ID NO: 865 - DNA, 501 bp, Homo sapiens
  misc_feature (1)...(501): n=a,t,g or c
tttctctctctttggtacagaatatagaatcctgacctcccaagaaagttaatttactcagtcagtaaatctggagatctctgcatgtagcatttttattttacatatttatttattaggccccttctggttccaaacaggatttggcacactgtnnttgattttccgcttccttccaactctgcaggaaacaacaaaagccccactaagacctcaaaaggagaaatcctcttgacccagtttcacgaatttttcgacactgtcgtttattgaaggccatcttgtggcaaccccagtgtccatgggggaggagcatacccagagaagagtgtaaaaacaactccatctgttacaggacaggggtcccaatccagactccaagagagggttcttggatctcgcgcaagaaaagaattcaggacaaatctgcagtgcaaagtgaaagccagtttctaagaaagtaaaggantggagaacagctctccatgacagggcggcccg

SEQ ID NO: 866 - DNA, 289 bp, Homo sapiens
  misc_feature (1)...(289): n=a,t,g or c
ntttttaaggagctttctgcatccactttatttagccagagagggaaggggttgacataaacgaaaaagtggatcaaatagtcaagaacatgatgggcgcggcaatgaactgaaccacttttgctaagtgacagaaaaatattctaatattaaggattattttacaactcnatggaagtaatgcngtgatgcatcttgcatctgttttgtcttgatgacaaaacgcactcttagagtcacaagatcctgccttgtgttagttataaacaaaaatatatttatatatata

SEQ ID NO: 867 - DNA, 512 bp, Homo sapiens
  misc_feature (1)...(512): n=a,t,g or c
tttaaaagtatcaaataattttattatgaaagataagccatttattgaccattcacttttctaaaaaaacacaaatgtgagaataaaataaacatacctaagactnactggcccctccaggacaggaagcagccctggacangagagcctgcaaacggagttnccttatgnnnaatgtctgaacttctcatacattctaggatttcatgtttcgttacaaaggaaaggaaactggctagaagattcatgtacaagaaggtcacaactttaaagctatctgacgctaatgacttgtacaatctggtttgcaaactctgagagacagtatcaaataagcactgttcaaagactactcccagctaatcctttactgtcattttctctttgaaattgtctttgggactggntatgtnctcactgtagcttccgtttatcccacagccccaaanccctanagtcccatggtgcagtctccatgttcaaggtataaaagtctgttttcaggacaangg

SEQ ID NO: 868 - DNA, 463 bp, Homo sapiens
  misc_feature (1)...(463): n=a,t,g or c
aaagtataaagtgttttggaaaaaaaggaaaaaaatctatataaaaatctcttcacatataaaatcctgaagaaggtgcaaggtgagacccagtgcgaggggcgtgctcagatatgcagtgtgtgtgtgtgtgtgtgtgtgtgtgtatccgtgtgtacatgtgtgcacgtgtgtcgtatgtgtctgtgtgtctgtgtgtgtgtgtgtgtgtgtgtgtgtgtgtgtggtgggtgcaagtgcacgtgtggcccacagagggtggggagaaagcttggctttttacttccatccaggagggaaggagggcggctggtcctccagccttggagggtctgcagctgggcgggacctctactcagccaggctgttgcgcatcgactccttctcctggagggcggccatggcaagacgcaggtgctccttcagctgctcgatctcccgctcagaccgtgtctngatgtga

SEQ ID NO: 869 - DNA, 437 bp, Homo sapiens
  misc_feature (1)...(437): n=a,t,g or c
ttttttttttttttttttttacaatctggaatatataattttnattagttctcagcagtgcagtaaatgaacaacacttattaataattaatttgggagagaatagcaggaggaaaaatataaacagtagctttttgtgaccatttttaagtagctgacatctcagtatgtttctggaatgaacaaattaagggtgtattgtatatagtgatttaaataatcagctttcttatagtcttatcaactgagattataaaattgtaaacacaatttttccatgtttacatctactagctttcatttggacacattaaaccatacttttccattatgtagttaattcatttcttgagtgcctgcctgccattagatgccaggtgcttatctaattttccagttagttactgttcagcttaagtcactctacttggttggtn

SEQ ID NO: 870 - DNA, 434 bp, Homo sapiens
atatagaaataactttaattaaaaaacttacatagaagattataatatcagacgtgacaaagatttgagtttatttgcctggacaacttgggtttgtctggcttttgttttctttttctttaaaaataaatgtacagtaaaactacaagcaaaagtttgtcagtattgaattgaattttttaccccttaaaaggactagtataatttccaatctctaacaaaaacttagtgtcaaatctcacagataaggccaaatggcagatattttcagttatgtgggtagtacaacttgagtaaccttttttacatgacaaaaagtgagttatataaattgtcctcaactttcacataggaaaaaaatggtttaatagcttcaaaaggaattttctttcatgtatactcttcagtatccaatattgaagctttgttctttg

SEQ ID NO: 871 - DNA, 350 bp, Homo sapiens
cagtccagtttgtttgaagtcaatcttttcatcagaggcagcttaaagatgctttcagttagttttgtcttactttcagatttctctacataaatctagatactcattaagtagccttatgacaaacagtatgagatacttatgacaaactcgctctgtcacccaggctggagtgcagtagcatgatcgacagagtgagtttgtcaaaagtatctcatacttataaacagtatgagataggaggattaaaatattattttaaagaaaccactgtttccccctaaaatgtcataagagcactgaagaacttgaaatatttttttcagagtttctcacacactttaaaagtc

SEQ ID NO: 872 - DNA, 442 bp, Homo sapiens
ttttttttttttttttttttttttttttttgcactgggctgattgtatttgcataaacccaaggaggggaaacggcagggccagcggtaggctgagctcactggcagtagaaatcccatttgtctgtcttcacatcgactttgccaggtttcagggtctggtcctctcggacaatgctactggggaaatagcccaggcgagcagccagatctccatagtaatctccctgaacgctgcctccccagaagagccgcccacggccgttcagcttggagaagacatacaccacttggccccggtgaatggtcaggaatcggcagtcgggggccatgtagtcctgaagggccacagcatgtgagatagggtggctgcactcctggtccgcacacagcttccggtcagccagcttgggcataggaccacccctgacaccaggtccgga

SEQ ID NO: 873 - DNA, 350 bp, Homo sapiens
  misc_feature (1)...(350): n=a,t,g or c
gccgagcccaccccgccctctcccgcccgggtccgcgcaccgttccgctgcagaaagcgcaggccatcccggtatccctgcttgcacatctctcgcagcaccaggggctccggcgggaagagggccttggagaggcggtagaggttgcgcaggttgaactggatgctggtgttggtgacccgcagctcgtggatgttggtggagctgtcctgcggacnagatgtcactctcgcccgagaagggggacactgtgatggtgttcttaagctcatagagtggcaggttgtctgaaatgccaccatccacgtagcgcttccacgggacacacagacaggaccgtatgtgagggc

SEQ ID NO: 874 - DNA, 425 bp, Homo sapiens
ataaagatttcctccaagccacatgaggactctggcacccacccacaaagcaagacctgtatttataagccgagggtcagggagctaactgcgggacccgtcagccccgtgtacccatccccgtccccacccccccctccaccgctgggcccatcagtgtgtgttggggggatgcttgcagctgggggtgaggagacaacaaacctcgggaactggagccagagctgcggcctgactgacgccttttgatgctcacgggaaatttctgcccaggatctcagccccaggctggttgtttctacaaatctctctcaaatgtattattttggtgacaaaaatgaaggagctttgtaaatttttttaaaattatgaatcatatcaagtagttgtttacatttcttgaaaaaataggaactcgggcagca

SEQ ID NO: 875 - DNA, 239 bp, Homo sapiens
  misc_feature (1)...(239): n=a,t,g or c
ctaaatgctttaattttttgtcacaaatatttctgcatctctcagtcccttcttgttggaaaaaggagggctagtgatacatttgttaatggcacttttaaaangtgctttggtatatagaggnaacaatgtacttcnnaggnatgttaataataaattaaggttataatggttgccatatcngagngaatgnataagattagtctcagcaaaaacaaaaattagtttggaagtagata

SEQ ID NO: 876 - DNA, 407 bp, Homo sapiens
  misc_feature (1)...(407): n=a,t,g or c
ttgtgcaaaggaatgcatgggtagcactatcttatgacctgggctgtctgacggctggctggcaaagtcaagtatctcctggcagaagtgcttgcgctcctcttcagtgaggtggtggtcactggctaagaggctgctggtctgcaggtagttttnaatttgtccaaggtgcttttaacattcggccagctgcttccttgtgtgtgtnatggggagtgcccagccctcagccaggtagtttttcagtgctccttgaagatagatttctgccttttgtggagcctttttcctcatgtaaaactctgccagatcttttccaacaaacttagcagatcgaatcctcccaatgcttgtatacatttcaatggtggcatgggacaaatctaagtagtgtttttcaaaagctt

SEQ ID NO: 877 - DNA, 384 bp, Homo sapiens
ttttttttttgtactctttaaatgtacttttaatgtattttaaagaaattttaaatgagatatttaataatacaagtatttgagagcaataaaaaaagaaagtccatacaaggaagatgaacttagagagagctaccagagcaggtaaatttccagcattcttccatcattgttgagagatgggtatcaaagccagtggtgttctgttctccttggcaggtagatccccaaggtggggtagctcaatgcaattagctggtaagatcaccggactcactcttccagggatgactccgtgcacattaggaaacctgacattggtttgccttccaatgtcgctctttgctgtgggggcaatgccctgggcacacatattatcagaac

SEQ ID NO: 878 - DNA, 223 bp, Homo sapiens
atggctcaatgttaattttttaatatacttgcaaatacattataataaaataatacaaccaaatcaaaaagcagccacttaaaaactgaaattcacaaaatgagctgttcttggctacatacagaaggccaacatttaaactgaatgataattaaacgtttactaccataggtaatatttacgcacttctgggtccaatagaaggtgttgaatcaatgtgatc

SEQ ID NO: 879 - DNA, 541 bp, Homo sapiens
  misc_feature (1)...(541): n=a,t,g or c
tttagccgctcaaagaaaatttattggcactcggtaaagacaatgccacaaaatgccattgaaacagatatctgaaagcacaaggtgctgatgtagccactagatgaatctgttcggtagcagttgagcccggtgaattaaggagtttacagctgttatttatgtggctcatgatgcttattgagcaatctgcaaaaatagatttcctgtctcacacaggacagggtagatttccagcaagcataatcaaaatctccaagtcttttggtcaaattagagctgccaccatgcacgaggttttacttaaaggtgtttactgatgaataaactcacacttctgtgaactggttcttgcttcttgtgcagctaactctttccacctctctttgttctgctgaatgatgtccaccaggttgttcttgaaactcttcaggtccactgctgcaagggagtagtctggggaataggnaccatcactcatggaggcctttgtatttgatcgtctaagtgcatcagccatgtggtaccccacaatgtgggt

SEQ ID NO: 880 - DNA, 414 bp, Homo sapiens
tggggtaaagtttaatggaaaagccgtggaaacgttgagttcacaaacaggacttcccgtgcaactgtccagccagacctggggcagctcctggggaccctgcccccttcacacacacccatcccatccatggtgcctgagaggccttcatcttcagttccctccaccagatcagttgggcatgttgggggcagagatggagggttgttgaatcacactaggctctgtaagctgagaagacgatcctgcacagggtggcgtaacagtctcctcctgccagggcacctgcagggcgagaagtcacatgccagactgaggcatgcttgcgaacactagcctggccccagcagcagggggtgctggaggagctgcagcttttccccatcttgctgaattattgatgggcctggcact

SEQ ID NO: 881 - DNA, 445 bp, Homo sapiens
tttcaatgcatgaatatttgattttatttcaaaagacaattatttataacactgaccctctatcaaaaagaatatgcttttctgatggggaagtgacaaaaaaaaaaaactacacagaacaagagtaataaagttctcaagtaaggattgcactccaataggaattgagtgattctctcagagagcactcattacatcttagacaacgtcactcttctttcctcttggccatatgttcaggtctcatagtctttctgaacacagaatggcagtggccagcattgtccattatctatgttccgcttgtttactaattaaaaagctttggtcttcagtgttgtaaacgcaatttctgccttcgatatcaaaaggtgagtgaatgagacaagattagttgaaggaagtacttgatattttactccagatagctgaatgaaaatgggta

SEQ ID NO: 882 - DNA, 263 bp, Homo sapiens
aatttttaaaagttgtcataatgcaaattttattttgattagtttttgtgactcctttatcttaaacccagcgatgcttgccacttcccaaggtgtaaaaatgtgaagattaaggtaaactgaatgtcgaggagtgtaaagagatggcaaaacacagataaaaacatccaaaaagcctcttggggcaggtcaagcttatgattcaacagttagaaaaccaaaattacttggacatccccttctacttaaagtgatatactgga

SEQ ID NO: 883 - DNA, 305 bp, Homo sapiens
ttttttttttttaagtcatattcataaattttattcatttttaggaaaggacatatctaaaattactaatcagagaattcaccctatagtcctcatacaaaagctggattttgtcaaggagaaaaagactctttcttgaaaaagattacagaattctttgtcctaaaaatgtagcacctcatacatagaatgtatagcataaaataatgtggctttcaacacatgatcattcataatttgtgaagtgtcttccctatgcatacatgaaaagtccatattttgagtattagttaaataaaaacttg

SEQ ID NO: 884 - DNA, 361 bp, Homo sapiens
tttggggtagtatattaactttattttgaattattatataacatggaatatgtcatcaaagaatgaattaatgaaaaacgtttgtagttcagttaagcagatgatttgcataggaattgctagttttaagtcttaggatgcggacgtaactgaattgtcaattagattaacatagaataatcatttacatgtgtgcaaactaaaatgcaattttgaaaataacacacctttccgtacagtctttggtaggtgatgattcattttccctgctatgggtaatctcatctagatcaaatgtgatccttctaagctagacacctcttccctacagtaagaaggcctccatattgttcaagctact

SEQ ID NO: 885 - DNA, 501 bp, Homo sapiens
tcatcctcagtgcaaactcgctggcacagagatgttcaatgatggcctcagatttcaactcgttgtcacagggaggacacaccgttgtgccttggggcttggaggcttcggtggcattgggcggcgtcatggcgatgcagacgtccccctcgggagacttgtcacacttaagcatctcgggccagtagaagccgaagaactgcatgaccggctcgcacgagtcgcgcacggcctcgcagaccagcgacacgggtagatgggccggtccaggcagacgggcgcgaagagcgagcagaggaagacctgggtgccggcgtggcagttcttgttgagcaggggcacccagctgctggcctgctgcttcacctccgccatggtctcgtgctccagcaggttgggcagcaccatcttcttgtagcccacgttgtggcacagccgcaggtccgcggggatgttcacgcactgaggtggcttggtgtagaagcgcccgctctggtacgg

SEQ ID NO: 886 - DNA, 242 bp, Homo sapiens
tttttttaacttttagcagtgtttatttttgttaaaagaaaccaattgaattgaaggtcaagacaccttctgattgcacagattaaacaagaaagtattacttatttcaactttacaaagcatcttattgatttaaaaagatccatactattgataaagttcaccatgaacatatatgtaataaggagactaaaatattcatgttacatatctacaacatgtatttcatatttctaatcaac

SEQ ID NO: 887 - DNA, 472 bp, Homo sapiens
tttttttttttgaaggacttaaaatacccagactttaattcctctaagattatagtcattaatcatgcttttatatcatattatctcttaacattatatcatattatctcttaacatttaatttctaaatataatgttcatgaggaaaagagaaaatagcttggcttctctcttcactgaatggttcttcttagtatcttctagatgttccagaactgatgtcagatttggctcgtcagagtccacaaaacatattggtgagaaagatgaagaggattcctgccgccttgactgtacaatgagcccttccagaacacagcagcgccggccaggccccggggagagggatcgctcaaacagcaccagaggctgcattccaacttttcctccgtcaacgaggccgttttcattgttagtttctccttaaacacaaacttaaaaacaactggcttaaatctactatcgcatcttg

SEQ ID NO: 888 - DNA, 566 bp, Homo sapiens
tttgtttaaatgaaaaaaagaaaactgaatatctccattaagaaggcaaaaaagtgccaggcacgttagcacacacctgtggttccagctactcaggaagctgaggcaggaggattgcttgagcccaggagtttgagaccagcctgggcaacatagtgaaaccctgtctctaagggtgaaaagaaagaaagaaagaaggcaaaatattagcacagattcattgtagagaaaatgttatgtatcctcacagactggagccacatacaaagagataagtagccttctttcccatgcttccagataaccaggatgcatctaaggtaagaggttggaggaaagaagacacattgctctgattccaagggtagagggaataatgaccagatttcaaccctaagatagaacccaaatacttgggaggcttgtggttctttcttcttaatggttgataacacagtgtccctacagagaggtcatctgaaactcagaggcaaataactcatcaggggcagcaacactggcaacctaacttagaagccccgtgtggccccttttttatttggagt

SEQ ID NO: 889 - DNA, 320 bp, Homo sapiens
tttgttgatcaacaaaatttgttgaaaagtgtagcatcatactcaaatacagcagtacatactagggaagtttctgtaatgttggtcctccttgttctccccctaccttcccccctaaaacaaccttagtaataaaaaaaaaataacacctagcacagttgcaaatacattcctgttttttaaaaagccagaatatacgtgtgtgtgtgttatatatatagttttaaaatgtgccctataaattttttagtttttcccttggtcttttgcaaaagaaaacaaatcctcaaatatacttagagctacatcataaaaatgat

SEQ ID NO: 890 - DNA, 318 bp, Homo sapiens
ttttttctgaaatcattcttttattttgcacacacatagctgctatttactgaacactggaaattcatgaatgcgttacatatttaaactttcatagaaggctcagatcaacaaagcaaaacttctacagataataagtagttgtgtatgcttgtcactcttgggcccatcagcacctgttccctatcatattgctgaactctgcaaactccagaaaggaaggtttcttttccaaacttcagagaagctgcagatcaagaatttgggccgttgcatctgattagaaactctcttcttccagtgtgagaacgttggatt

SEQ ID NO: 891 - DNA, 451 bp, Homo sapiens
tgaatgatgtgcaacatttaatagtcacaaagcatttgctttcagtacagataatgaaatacagtagtgtgaggtttggttgttttttaacaatgaattgtgctgggcatttatgtatagagggcttattattttcttctgtatttctcatattcacagttgttaataagttttctgaggtgtcccaaagatgcaaaagcagaaatttttgaacacgtattttgagaatttctgaaactcacataggtacattccacagggaatatacagaaattttgcttgattgagtatagagttggtaaaaatttctaccacaattaggtttacacaggaaaatgtaaaaaattactattttaaaaggtaacacagtattaatgaagatgtataactatagattgtttctagcttcagaagaggtcctttcaatctgtattaaaatgttgtgttttct

SEQ ID NO: 892 - DNA, 405 bp, Homo sapiens
tttttttaaaaaaagtgttttcccctttattacagaactgatacatatacattattgaacattaaaaaatacaaagaagacattttaagaatgcaattaccaaacattttcccatccaaagataatcacttagttttttggtgtatccttctccccgccacccaactcttagtttgcaaaatttcaaacccacagcaaagccacattgatagtacaatgaacatctgtcgaccagtcacctagagtcaccaagtgttgtcattttactacatttgacttgtctctttctttctttatattcatatgttttatatttttccacttagtcactggaaattcagtggcagacactgtggtaattaatatctaaaaacttcagtatgtttgctaagaacagaatgttct

SEQ ID NO: 893 - DNA, 182 bp, Homo sapiens
ttttttttttttttttttttcattgtatagtgactttatttgtctcatagtttttgtatcaaaatcaatactccttctctttttcctggtttccattggcatggaataactctttccaactctttactttcagcctatgtgtgtctttatagtttaagtgtgtttcttgtaggcaacagatc

SEQ ID NO: 894 - DNA, 481 bp, Homo sapiens
tttgcttttctccttcctgtgcatttaatcaatgaaaacagaggttcagaatgatatgctaatagtgggaggaaccacagcaatggaatcaaacaatcagttcaaatcttggctctgccctagtagctgttctctgtaaattggagttaataaatccctatgagaagtggctggtatataacgggtgctcaataaatgttagtactcttcctcatgagcatctcagaggataagaggtggacaactgcagcctagattgaaaacctgagttatggagaaagagttaaaatgacttaatactgtttatatagggccataaaaacaccatctgctagctctagctagttaagttattacaaagctgacatgcactaatgctgcactgataggaaaggaatggccaaggttttgctgtttctatcattattcgacgagctgccatgtcgggaccagtcgccagtttaacccatcacataacctg

SEQ ID NO: 895 - DNA, 335 bp, Homo sapiens
tttaggagtacacaatataaatgctttattgctagcacagaggtttctttttaagtaaattaaaagaaataaatcttcattttcacattttttgttgcagtccaaaggtaactagttggttagtggctatgtccacttggacacatgctacaggagggcagcattcacatggaagcactcagaaatacggcatctgtcagggctcacggcactgggctgctgaatgcactgtcgtttgtaaataacagcaagtggagactttaaaacatcatggatagataagagttataaatagaaaactggtacggttaagaagcagaagatcgttaaataca

SEQ ID NO: 896 - DNA, 406 bp, Homo sapiens
aatctgaagcccctgattttatttttccagcatcactctaaggaagagtgtggattagtgccattattcagggctggtattaataaaagttagcttttatctgcagggctaggttaaggctggcattcttacttttacattaaaaaaactggctacaggctgcgcactggaggtacttcagtcatgtgccttctctaaaggattcttagatccttaaaatatatagtatgttttaagtttgtatctaaatagcacttactgtaatgtattatacctaaatgtttattaaaagttagaagaaatgagtaccaacaggccggaatggaagtgaggagaggggctaagacattgctgatctgagggacagacctctatgcaatagaagagggctgggagaaggggtgat

SEQ ID NO: 897 - DNA, 265 bp, Homo sapiens
tttgtagagagaaaaatttattgcaaggcagccaagcaaggacacaggagtctggcccaaatctgtctctccaagttggaggctggggcagattttatatacagagggtagtgaggcatgatatgattggatcttgtaatgaggggattcaggaggcttgatctgactggatcacgccagggctcaatctgattggatcaaggatcatgccacgtggtgtccacttcttaactcagtccctgttcctcagtctgagcacttaggt

SEQ ID NO: 898 - DNA, 400 bp, Homo sapiens
tttgtcttttaaaaaataatttaatgaacatatagtttaagatatagtttcatttctacaaagatgcatttaaaattacaattttagagccaagacagttctattaaatcaattgtcaatattaacataattgattgtttcatccaataatgttatattccaggtttttcttttaaaaaagactacttttaagagcagttttaggttcacagcaaaactgacaggaaggtaggaagattttccatatatcccctccccccacaagtgcatagcctccctcttcatcaacatccctcatcagagtagtgcatttgttacaattgatgaagatacattgacacatcataatcacccaaagttcatagtttacattaaggttcactcttgatgttgtacattc

SEQ ID NO: 899 - DNA, 425 bp, Homo sapiens
tgaagagcacagatttattgaaacaaaagtacatcccacagagtggcagcaagattgagcaacctgctggagaccaccggttacagaattttctggggtttaaataccctctagaggtttcccattggttactcggtttacgccctatgtaaatgaagtagtgatccgtgaccagtctggctggtcgtgggaggggaccagtcataggtacttttcatttttcatctgccaggcagaaaaggggcaggttgcaaagggagtataacctctgattcttttgttacttgggcgaggaaagttgagattttcctttagatttagttataggaagtcagtgtgaattggctttaggcagtgtgaactgcctctggaacttattctcctgcctcacaagcatttatgaaatctggccctagacaagatgt

SEQ ID NO: 900 - DNA, 530 bp, Homo sapiens
ttttttttttttataagcagtttttaatccataaatacaacaggcatttggtattttggccatcagaaaacaaaagttgtagtatcagtaaaggtctgagatggttcacttttgtagattcaattcagtgtatttaaggttaacaaaggctgacattgaaatgtttaaagataggcaaaaattcacattaaaaaaaaccctatatttctatttagagtaacagtaggcagtatgattccaaaagttaaaaattatttcacaacctgtagcttcagcttggcaaacagcttagattccaaaactgattcatctctattaaaatgtaagcacttaaaaaaagagcatgtctgtgtatatagacatatattttaaaggaatcagataatctttgaagcagccttagtgtttcctttaaatttgtctggaaatgaccattgtattagcttcacagaaaggactagccagcttcttcgtctaaggctaacatggtgatcatttgtctaaggctagaaaggtaccaacaagatgta

SEQ ID NO: 901 - DNA, 116 bp, Homo sapiens
tgaggccacacatgtttattaggccggtcctgacacctgcctgcggggaaggaccaccgagaccagatcctgggtgccatggggtgcagggacagaccggtgcatggcagcggctg

SEQ ID NO: 902 - DNA, 485 bp, Homo sapiens
tttttttttaataatcaactaagatgtatatgtaagaaagcctcatcttttgatttttaatatacaagatgctttctttaagagagcaagattcaaaattgttttgtgtttcaaaatttaaaaataaatttatctcctaaattttctaaagacatgtttcatatatttgaccatcccttattttggcaaaggattttaagagtctaactcaaacatatgtaagctctggtgtacctggttatatataccaaaaaaaacatttgatctatatacacatagacatgaatatatttctgtgtgtgtttgtgcatatataacctcaaacactattattaaatgcaatcctatattcttaggtatagaagttgatgatatacctttctacttgccatggcattaacaaagcaaggctgagactcagcaaccacttgtgttcattgcattgcaggctagtagtaagtttggttgctggtaggaaaagggtc

SEQ ID NO: 903 - DNA, 488 bp, Homo sapiens
acatggctatttcatttatttagtagttttgaaatgttagcaaatataaggtatttgtaaagcatctttcattataaagagattagtaatattcaccaatcatgccaatgagattatacactctgccaaagactactagaaaaatttgatcattattaaattcaatgttatttgacagtgtgaactctatgtaacagcacaaattctggactttgaatctggctgctgtcctcacctgaaccattaaaatgaccttgttaacaaggaaggaatcaatggggatatatcacaaccagagattggctgtgtgtccaagggtgctttgtcttgttgccaggatcagactgtgaaatcacagaggcaagctgatgtcatcagaggtgactctgcctatttcaagtcctataatcaccccatgggattcaacagcagtaggaaaacatcacattctcttaatggacaccccatatttgtagaaacagttatga

SEQ ID NO: 904 - DNA, 354 bp, Homo sapiens
tttttttttgcctcttttgttaaacagcaacagagctctgccactttggccaaccaccctcctttgtcctcttccttttccctcctgccaagtgtcctattctcaaaaggtctaaatcactgccttccagcttggtgggcaacctgctgggggccccaagtgaggtggggaggggctccctagctatttcccagtgacctctatcacatcatcgtctttatcctcatcatcattggagctgaacccaacctcggcaacctcatgagagtcaaatggaggcacctgggaccgtaggaggccaccagctgggtagcctgcatgtggggacatgtagcctggatagatagacatgcc

SEQ ID NO: 905 - DNA, 407 bp, Homo sapiens
tttatgtaattgcctgtttatttagtggcaccagttttccaaactagaaattatttctacttttcatctaacatacaatctgcaaccattcgcaggctgaatgcaatttttcaatgaacttgaaaacaaacagtacattcttaaagttagaactgaattcacatattttctttggaccaggaaataatacataatacaaaatatacatttatggaatttctttaaaagtgtggatcacataaactgcaaagtgggtgagttgctacggagaattttgttacacattgtatttaagaaaaatatttctgcaattatattattcttaacatttatagagtttaaaaaatgaatatataatgcaacatgcttttaacatgtacatgtctctccactcataacatttatac

SEQ ID NO: 906 - DNA, 189 bp, Homo sapiens
tttatattcataattttattcgtttgttgggaaatttaaggcatatagaagttaaaaccacagccaagcctcaggagatgcacatgttcaaagatttcagagtgcagagagtcatttcattttttacgaagcacgtgctctgcttccggacggcgctaagtcggctgtgtgcccgggcgcccgcagttg

SEQ ID NO: 907 - DNA, 513 bp, Homo sapiens
ttttttacattttattagaatctttttatttttttctgcagaaaacatttgagatgctcatttgatataaacatctaattccaagagagaccagtgctcaaatatagttttttcagctaccatttgatacggccataaatttggatggtccatgttacaatccttccacaattctccacttaaagacatcatttttctatgtttttaatgactattgccatctaacaattctacaattcgcctctttgcctgtaaaaaggccaactctacgtccacctgtgtctcatattgctatcttttatttatctctgcttaagattgcaaaagtttttgattttattattcacctgaacaatgtattgcaattccaatacacccccatctcttgctgttatctacagcttgtgacaaaatgaacaccttgtagaaatatcctactggttgggtttcccaagtctatgacaccaagagagaagcattgctgatggattgacgaggagaccaccagatcat

SEQ ID NO: 908 - DNA, 441 bp, Homo sapiens
ttttacatttcttctgtctttattgtattgcttcaattggcaaatcatgcttgtattcattcatggggtacaatgtggaatgaggaaatcccactacttagcatctccactacctcagagagaccaattccacgtgaggtcccagaagtgttgatctaaacaagttgaccccatagaagtagcaagtagatcgatggtgaccaggggtcagagagtggcagaattacggaatgggaggggggttgtcagttaaaggaccaaagtctcaaggaggaggaagaggttttgacatgtagtgcacagcagagtgaccagagtcaatgagaatgtgttgcattttgcaaaacacctgagagagtccatgtcaaatgtctctctgcatttagattggagaggacgaaggccctgaggtccaagaacattgaaacctgacagtggatg

SEQ ID NO: 909 - DNA, 398 bp, Homo sapiens
aattaagaaatcagatttaatcataaacttgtgaaaggaacaaattcaatttttaataacttttatatcaatggaagaagcattttcaattggcaaaactagaggtttctccctaattttctgtctgaatttttataaataaaatgcattatttagctgaaattttaaaaatatttttttcactagacgttagagcaatcttagattttaaataaattgttaagtatcatgaacatgttatttaagatttaaaataaagctaagatttgctttacattgtggcaaatatatacattttagaaaacaaactttgtatttagtcaacataatttttaaaataactaggttgtggatacacataattttctgcagtaattgacgacagatgaaactacatt

SEQ ID NO: 910 - DNA, 389 bp, Homo sapiens
  misc_feature (1)...(389): n=a,t,g or c
aaaactgagggaactcatgctttaatagacactgaaaatcacaaaggrggaaggccaagtgccttagcaatctcaataaaaatatgavgttctttttacatggtaaatttcataatataamangtttaatgtctggvaatggtgtaatttacaaaamaagtccacgtaggccaaagatggctaannctgcatataaggvacgtgaatsccagtggaaaggtgtctgaggaggggcagggccacaggtgtcctgacagggaacatctttgaaggatctggmacaaacaagggcccagttcacaaaccacaggtacactcattttagataggmcagcagaataggtgatgaaattatacagtttycacttgttgcctacttactgaagcaa

SEQ ID NO: 911 - DNA, 231 bp, Homo sapiens
  misc_feature (1)...(231): n=a,t,g or c
taattttccacaaagagctccagaaggcaaatagtttatcacttccccactctgaaatagcacgcaagacagatgatgcaggggaatgggtgtccactcttncttgtnctcagagctcctgcagcaggcctgantgacccgcaagcggggcccatgcagcgtgtcctctgcaaagtgcaggtnttcagtccacacacagcaccaccagcactgctgatgtcacggttgtct

SEQ ID NO: 912 - DNA, 518 bp, Homo sapiens
  misc_feature (1)...(518): n=a,t,g or c
ttttttttttttntttttttcacccagtnttctctgtttattcttctcaactacaccatgntgctttgcagnttggtttnacaaacatttccccacaattaggatgcatgatgaccaagggaggaaagaaaattttcacagggtatttaaaaagtctcagggaacaaacagntcagtgncaaatcagtaaggctaacacctgaaaatgactctgcacaggtgaggaagtggagcagaagagggaggggctggttcagggaacaggatttaatatgtcagtgaagaccctgcctctctctgtaacaagatgcctaaagaagantagtggtgcttccagcccagctccctcttnttttgggaacaacagtcatttctcagaaacctcacttncaaaggcagcccttncaaaaacatgagagntttagtttggagaaattttttaagctcacttttgctggagaggaatgantttaaactngggcacacagngagcancaaanagttttnaagagccacct

SEQ ID NO: 913 - DNA, 427 bp, Homo sapiens
  misc_feature (1)...(427): n=a,t,g or c
ttttttttttttaaaaataaagcctctttattggntacctgtaagctcaggtacaaggtgttcccacaaggcacacaggctggcaaggcctacctgggncaaggggcaggcccagagcctngnntttcttgggcacagacacagagagnaaatggaataaattatagttctgacactcagggacaatgtagaaattatgatgcaaaattaaacattaggcaaacaaagggtataaaaaccctcaggagccacccctcgccaactggcctcagggcatgggcaggtnggccacgatgaagtgcagtgcccagaaagccctgagataatagtctggggcatggttcncgccccgaggtaggccctttgccctctctgggcttcctgtttcctccttccccctnctacatccctgggcctagaataaagg

SEQ ID NO: 914 - DNA, 442 bp, Homo sapiens
  misc_feature (1)...(442): n=a,t,g or c
ctttaattaaaggctaatgcttagcacttcattagnaggtggagagattaaaaactaacttccttgccgaatagcctgggtttggaaaagcatgtttttgaaatatgtgggatctccactctggggccctctgcagtcctgtctgggtcttcacacctaagtcaaagcaagagctatttttgcgttagaatttccttagccaagactacaagaggccaaatgccagggttcatctcagcttcctgtgcattcacatggaaggtcgtctttgaatctgcacgtccagctcgccatacacatgtctcagggagtcactgctcatgctgggctatcagcttccgatgcccagagacccaggggccggcacacttcttcccacttgcacggtgggagttggggccnggattttcacgggaacatcttctttcatttgggnctttgt

SEQ ID NO: 915 - DNA, 328 bp, Homo sapiens
  misc_feature (1)...(328): n=a,t,g or c
nagnttcttggaacaagtatttatttaactttttattatggaatatttcaaatacacataaaagtagaaagantagcataataaacccccatgaacccatcatccagcttcaacaactaacatttttcccgatttaatttcaactattcatcacccccccatcttttgcttgagtattttaaagcaaattcagacatcatatcatttcacttatgtatatctnagtaaatgtctctaccagatgaggttttgctttgtaattnaatcacatgtcaaacctaacaaanttaattctaatcatttaatatggattnaacatctaggtctt

SEQ ID NO: 916 - DNA, 295 bp, Homo sapiens
  misc_feature (1)...(295): n=a,t,g or c
acagctaggcatgggggagacagaattggactgagcaccaatcattgttctaccttcagtgagctgtgcagccataggannctcccagcttctgctgtgcacctgtcttgagctggaaacaggtggcgggaagcattctcaaaggccccttctagcactaactttgtatgttcagtaaatatcagttccctggaccagctccttttattctggtacagaattattcttagcctatggggtgggggtggggggacagtagtgtctatnatttgtgaattttggaaccagtgtcatt

SEQ ID NO: 917 - DNA, 592 bp, Homo sapiens
  misc_feature (1)...(592): n=a,t,g or c
ctttcaagatgagctgtatttattactggaacggaagttgtcatatccgtgatcattagctttgaactttaagcacgactgcttttcctccaaggactgtttttcttcaaatgactggcaccagcagcataagcatgacttaaagcagtttttgaatcttttgctcaccaaatacagagcaattgggttaatgcaggaattcagtgaagccatgttgataccaatatagtccaataccaacagaaagctcaaaagttcacatctattgggatcattctgattataaagagtgagcttcagaatcctgctgaggtgaaggggaagccagcagagggcaaagaccaggaccaggcaaaagaccggnttttgggccacttnccggctctggctttagggtggtccatttaaagcaatctgcatgccacttttccttctcaacatttcacaggtcnttagtgtataaaaaatgcngtgatggccatgnaaagccggaattgnactggacagccaccatcttttgccggcctggnaactggctgnaagctgtcttctgaacnggatgagccagccagttccccgatacttccnttgt

SEQ ID NO: 918 - DNA, 446 bp, Homo sapiens
gacaggttctttctctgtcactcaggctggagtgtagtggcacagtcacagctcactgcagccttaccttctgggctcaagtgatccttccacctcagcctcctgagtagctgggactacaggtatgtgtcactacaactgactaatttttaatttttttatagagacacaggatctcactatattacccaggctggtcttgaactcctgagctcaagcggcccacccacctcagcctccctaagtgttgggattacaggcatgagccacggtgcctggctatcacgcaattcttaagtgcttattccagtagcagaagagattagaaaggctggctttttccaacagtgggagcttgaatctggaaagtcttaaagttgttgtaatttcacactactaagaagcactttgctcatgcaactgaaaaaaaaattaagtgcctaccg

SEQ ID NO: 919 - DNA, 447 bp, Homo sapiens
gctttccaaagacaacaattttcaccattactcaaaattctgtaccaaatgcaactgattaaaactggatattcctgaagcctaccacctgttcactaatgtccacaggcagccccaatccacctcagtcaaacgtcacacccaaacattcagcttttctcagaccaaattaaatgtttacagaaaaaaaaaagacccaaacgctaaagatatttttaaaatatttaaacaacacaataaagtaaaaacaacctcagacccctcagactagacattcccactgaaaattctttgtggtccctgaatttgattttctatgcaaaggcattgatttccaaagaagtgtgataaaaatgtggtttgggcattctcaaaaactcccagaaagttccctcttctggctggcgactttcactgaaatggaaaatccttcatggagaacgaatt

SEQ ID NO: 920 - DNA, 267 bp, Homo sapiens
tttttttttttttttttaaaagtccatcaaagttttatttctaagaaataaacttgcatataacccaaacgtaacaactctggtattacatcaatacagctataacattaatgcagcaattatataacacaaaagtgctataatgacatgggaaatgttcatgaactgtgaggtgaaaagatacagaaaatgactatgcctactgatactacctttgaaaaaggatccataaaaaatacattgaatataagttggctaaagaaaata

SEQ ID NO: 921 - DNA, 416 bp, Homo sapiens
caacttataagtaatttattatgatattatagacaaatgcaaaattactgatatatagggaggttcattgcacagaaatttggtgctaacataaatatctatgagtgagaaatgcttaaaacatttaattatattttatctacaaaacattcatgtcgtcattcaacaaatgacacagatgtgtatgtactactgaaaaagaaaaaggccattgaataagggctgttaaatgaaagaggtaatttgcagaaaaatgtgttacaatatggccacacacgtggatccttccccataatggcttgtgtgtttgtgtgcatctatccactaaaagaatgcatgtagttcacttaatagaggaaaactatagggacagaattggaagagaggagggcatttaatttatatattatttaaat

SEQ ID NO: 922 - DNA, 228 bp, Homo sapiens
  misc_feature (1)...(228): n=a,t,g or c
ccatttgcatctgaaccttcactaggtcagttggattggctaaaaactggccaataacaccagccatcatccctccaatgactgatttccaaaggggataatgctcatcttcacttttgccaaacacaacctctcggagatgttcatatcgtgaccattcgacctccagaatacactgggtaaaaaagatcattaaaaaggtaactttggctatatgtatcnatatgc

SEQ ID NO: 923 - DNA, 466 bp, Homo sapiens
taaaagccaaaataataattttatataacataaatacagactaaagcaagcgtaaatgttatgtgttttaaagtctatgaaaacatacatatttttaaagcagtcaactcattgaaagatactaatatttaaagtagaaagttgtgttgtctgctgaacatgagactctgaggtatttgtgagagagaaattgtcaggaaagcagtagaacatttcctgcccatgggtgcagtcttgagtatttgtaatagccatgacgaatccaaaaaccatcaccacagcaccaatgggaagcatgacacaagacataatcttatcggagtgtgtccttggttcttcagacagtttcagataacaggctgatggaatgataaaaatgaggggagttgcacagagcacaccattgagttctagaactatcccgaggcaatcaatcagcaatgacaccagcgtgggctacagtgat

SEQ ID NO: 924 - DNA, 431 bp, Homo sapiens
cagcagccggagcagatttgtatttagtgtttctgagccgagcagacctcctgtgaatttcctgcttactctgttacacaaacaaattaaagaacaaaaagagaaagaagtaaaaagtgcataaaggttgcagtacaatcatcttacaaggatcccagagtatgtactttataagagcatttaacaattaagattgcccttttgcttttcaagagaagtaattacagcaactaggctaagtaaaaccggaagttcagcacccggaatctcggagctcgctggacaggcgtctccagagcctccaaaaggtgtgagctgcttgtaatagggcaggaggcgggagtaggagtcagtcttgaccaagacaaacactattcatttggttgtgtctacaatagagaaaaacacttaacaactttactccctaaggc

SEQ ID NO: 925 - DNA, 492 bp, Homo sapiens
  misc_feature (1)...(492): n=a,t,g or c
ttaaacaagtaaagttgttagtatccaggcactgaattataccttcatggtatcaatcaaagctatgatcagaattttatgtaactgcttaatcacttctttaacaagtgtaccgctacaggtaacattaaacgtctctagcaatgatctttatcgggttctcttgccttgactgaaatattattaatacttcttatatccattaacataaaataactttttgttgagcaaaaatagtgtgaaaacattaagatgaatgtgcgctttggaaatgtttaaatagatatgaaatgattaaataaaatcacagtcttgtgcaacatccatagcttacagttatttggcaactatgaaaccacagttactaatgggaatttaagactttttaaaaaattgccaaatngtacttatttggtatatgaaagagggtattcagctattaactcagtanttaataaaccattgatatgnaatttttacctggaaatgggc

SEQ ID NO: 926 - DNA, 471 bp, Homo sapiens
  misc_feature (1)...(471): n=a,t,g or c
aactactacatttaatagccttcttctctaacacagtaatttttatttaaaaaggagactaaacagaagtcaggggtaggtggttctccatgactgcaaataataataataatgatgattttttttaatgtacagctctcacacaaatttcattttgtgaacacactggtaagtacacgatgctggggcttccaaaatgtggcgtatcccactgatggctccaacttgcgagtgggctcagttatgaaaaactcgggagaggacgggttgtcgctgctcgagccgttttctcggaagccgctgctcaccaacttctcgtatttctccttggtacgcgtccctctccgcgcaccagcctggagatctcctgcttgaggtggtcgacttngctgcagcagctgggttcttctccgactccaggacgtgtctctggctgcaccctcttgaagcggcaggactgggnatagccgn

SEQ ID NO: 927 - DNA, 318 bp, Homo sapiens
  misc_feature (1)...(318): n=a,t,g or c
acgtaaacccagacatgcttctgctctttttaattagacagataaaattagcaaggagattaaggtaaaaggagaaatttaaaataattaaatgttaggtggaatttacaaaagtgaattgaacaatgaggtacaacaaggaatgtaaagagaaacacagacacatttgaaacattcctcggatgccacacggcttaagccagtccataggtaaagcaagaattctcccttgtcacttcttgaattgcagattccagtgatgtgaaagaacattctccagaaacactttccttctccttttcttgagatgctancaag

SEQ ID NO: 928 - DNA, 295 bp, Homo sapiens
  misc_feature (1)...(295): n=a,t,g or c
ttcgtaaaacnataaaacaatggtttctagcaagtaaacaaccaactgatcatctctttttacctttcgtagatgttttcttcttaaaacatatagttatatgtttagcttacatatttatgtatattatatatcaacacttaaagaataataattagattcacagagtacggtgggaaatacaatatattaccggtacactattcaggcaagcttatgggaatgacaaaaaaggantgaatcacttttcatgactaggtatcttaattatcctctggtttttttctgactaagg

SEQ ID NO: 929 - DNA, 188 bp, Homo sapiens
  misc_feature (1)...(188): n=a,t,g or c
ttcaattaaatgtaatttattgtattcttccagatcaaacataaatgaacatcttgggaattgataccacaacacaatgttatacaccattttcacaaccagggttgcattgaatncttttttaaagaacatagnaattttaaaaaanccaaatatttacatattaataaaacatatntacagaagat

SEQ ID NO: 930 - DNA, 316 bp, Homo sapiens
  misc_feature (1)...(316): n=a,t,g or c
gttttattcatgacaatctgcaaaaaaacaggtggatgggtcagaaagtcactgcaagcctacattcaggggctccacccgcagccaaagcccgccctcggccgnnatgatcagttccagcttcctgcggggctcagtgtggtctggcaggaaccggaagtgcagcagcatcaacgccagggaccactttcatctccgccatggggaacgctngccccgatgcagttcctggggccctgcggagaaggggaataaaagccagagggtgacctccccttgctgttctctgggggtcaaagcgggaggggggtcgtag

SEQ ID NO: 931 - DNA, 324 bp, Homo sapiens
  misc_feature (1)...(324): n=a,t,g or c
taaatgtacatttactataaaagctgttgcattttagaaaacttgttgtttttattttttactgtttctcagaggcattttagaataaatactttaaatgaaagttagtataaccgatatagaacactggcccacccagagcagtaacatcttttggacggactcacatatgaggtgggatcatttcagtttgttaaatcttacactgcgtataggataactataatatgtattgcattaatcacactacatgggaagggnaatgtcaggggaggttcgcctaggtggaaaaaaccaaaaggttaccccatttatttttattaa

SEQ ID NO: 932 - DNA, 377 bp, Homo sapiens
  misc_feature (1)...(377): n=a,t,g or c
tcaagatggcatctttaatcacattggccaaggccntaggttccctctgttcaggcccacttagccacacacccaccctggccatatccagaacacttctaccaggtgggccctgcctgttggccactgatgtgggaacctgaggtcacatcagtctgtggactcctgggttaggtgacccttntgccttgaggtctgctggacacctggggcatgggatccagtagtcctgagctcactcttttggccatctccagctgntcctagggggacatggctcaggcccgntcctgggggcagggggttggcggtggcatgaggtggggttgggggaggaggacgtntctccacatttgcagctggctttcctcctgggg

SEQ ID NO: 933 - DNA, 330 bp, Homo sapiens
  misc_feature (1)...(330): n=a,t,g or c
ttttttttttacggtagcaaaggaaganctttattcaggaggcgggggctctgggctggcantngggnatgcagggagaccctggncagtaggcacccagcaggatggcattgatgtgctccagggtcaggttgctgaagaccatgttgagatgctgtatcccgtgcagggcagcaggtgcacaggctgtggctggcggccctgccacangccacagagctcggtgctgcgggtcgccaccgtgtcatcaccatcctcatagagcacacccacagggtccgtgtaggggaagccgtggtcgtagatgtaggtncggggcgtgggcaggcc

SEQ ID NO: 934 - DNA, 383 bp, Homo sapiens
  misc_feature (1)...(383): n=a,t,g or c
ttttttttttggcaggcatggttcaggctttactgggcatcacacggagctggggtagggacccagcaaagggagcagggcatacagatggtctttgaggacagtgctagggagctcagagatcagtctggcttctcaaagaagagaaaagcactgacaggaaaagcagtcaggttggcgttagtgcagggaaagggaagacgttaggagggggactttgatgggagggacagtgggggagctgaagcttttaaagagcctcgatgccgggggagggatgatnttagaaggaaagggaagcccaatgaggcctttggggaagagaagagantagaaagaagggaaaaaggaagaaggccagtcccagggattcaggcttttcc

SEQ ID NO: 935 - DNA, 429 bp, Homo sapiens
ttttttttttttctgatttcatcttttattaaaagctgagagttaaagaactgtagggataactaagtccacctcaaagtccagacagaaactgccctcccaaagaaacaatgtttctttaaaacaaataccacaccttcccagatattatgggtaggtaagtgactaggttttgcagattaatctatagctgcccatgtgcatgtagtccagaaaacatgccaagaaggaagagctctgaaccagacacagaaaggcagtgtggcttcctcgctcaaggggaatgcaaagggctaagagcctgggctttcaagcagctgttatgctagatgaggaaaatgcaaacagattcaatctctggggatattgctgccaacatgctaagcccttcaccagttgccttgatttcgaaggcagtttcccctatgt

SEQ ID NO: 936 - DNA, 377 bp, Homo sapiens
  misc_feature (1)...(377): n=a,t,g or c
gatttaaaatacatctttcatacattgtttaaaaggaaaaaggaatcatgtcaaaatgtttcaggaaatgatttaagttagatataaagancatagttctgattttgaagtgttagtggaactcaaacagaaatgattagngctctcttaagancatgacatgattcttaaagtgggctatttcagagcctagaaataacactgtattactgactaatgtctacagagtactgcaaaagatgctggaataggaaaaggcagggtgggtgtgaaanttttaatttttaaataggcaaagcccctgtctgggggtattgtcaggtaactttcnggaaatccnaggaggaaaatgatggttaggggnccacnccaggggg

SEQ ID NO: 937 - DNA, 259 bp, Homo sapiens
ttttccaggtaacacatttttattgtaaaatatccacttgagttgaaaaagttgtcaattacaagtttaaggatacgttatatatttggcttagttgtgaaaataatgtacatttagaatttaacatcacttaaatccattccattgtaccaatattatttatgcatccttatacttaagaatagcatctactaagacaattatgcagaaaagatcccagggataatgcaacacctaaatataatggtgggggagataa

SEQ ID NO: 938 - DNA, 260 bp, Homo sapiens
  misc_feature (1)...(260): n=a,t,g or c
acttttcataaatttatttatgaaattaaatgtggtttctggcttggagaaggaatagtgcaagagtgactgtccatgctgctgaatcctgtgggctccacgccagctcgccaggccctggntctgctcctggngccccttggcaggacagggcgccatntncacacacccgctgcctgggntgtgggtcantcctgtntgctgagccacagaattcggtctntctcttatggcttctcacgttcacgagcgtaaggcaa

SEQ ID NO: 939 - DNA, 375 bp, Homo sapiens
  misc_feature (1)...(375): n=a,t,g or c
agcattgtcttatttattaacataattgaaacattttgcataaaactcttgcccatgactattctagcaacaaaattgtactcaaaatatttcactgtgaaatggtattgcaacttgaatatcattttttattaatgaattgatttccataaagcaaatcttactcttaaaatggcagattatgtgatcaaaaagcgattcaaaaaagcttccccctcctcatgccaaccctcaagaccatgtggatccagctgaatcctcagccctgggnctagactanggttgaggggaagagccgttaactcattcctaaccagacaggctaatngggcactccaactcacacttcaaggggccncatggacagtcgggtgt

SEQ ID NO: 940 - DNA, 232 bp, Homo sapiens
  misc_feature (1)...(232): n=a,t,g or c
ccncaaggatgagtttatttcacatgtcacccagcatgcaactgaacacatcacagaaaccaaatacttactaaattagtgtgcattgctttacaaggaaaagtcaataaaatggcatagtgaatatatcattggncttgaagncagtgttcatctgaaaatgggnacaataatcatgncaataccnttcagntaatcatattctgaaaattaaatacattgtattacaatg

SEQ ID NO: 941 - DNA, 277 bp, Homo sapiens
  misc_feature (1)...(277): n=a,t,g or c
ttttttctcagtttctcctttattgctcccgtacgaacccctcccctcccccctgtaaacacagtgctgcgagatcgntggcagagaaggcttcctccagcggctgggtggtgaaggaccctggctcttctctcggggcgacccctcagtgctcggcagtcatactggggtgcgagagaggtgggcagcagntcagcctccccccgntgggatgcgaaagtttnttggtntcagcttcatttccgtgaagggcaccnngaactcgaagcccttccag

SEQ ID NO: 942 - DNA, 405 bp, Homo sapiens
  misc_feature (1)...(405): n=a,t,g or c
cagagncnagtttattgcactgactcaaagcacaactaaaaattaaaaccagaaagaaaactgtacaaagcacgaagctacaactttaaaagcatcacctagacgcgggtttaattgcactacagnccatgggtgaggagagctttncatccgtgagcgccgggcaaggacaacagacacagagagatgcagcccgcctgggntcatctgctgcaccaacttttacaaaaggttctagaaaagggaagtntnaagtcagatctgggatttcggcatcttgacctcatttggacatggaaaacctccacctatgtggctggctgggtcctgtcagagaacatattttatcaccctccacctgcggcctgggggntccctgacaccaaggactnggcctgggcaggg

SEQ ID NO: 943 - DNA, 471 bp, Homo sapiens
  misc_feature (1)...(471): n=a,t,g or c
tttttcgtttccatacagttttatttgcaatttgttggaaccatggagaacaatcggcagatacacatgttgcttctgggaacagcattcaactccagatgctttttctgctaaggagcagggccacaggtnncaancnacccagtgctgtgctgcgcggagggctgtactgaaggttctgaaggcctggngagtccccctcacggccagaaggagagacccggcttcggcttcatggccggcctcccgcagtntctgcccagctcctctgcatcccagcgcccttgctgggaggctagccaagaggtgggtcaacaatacgtgggatagaaggggagtgggagacacantttcaccagcagcttggcatccaggggagcagggaaagaagttntttgggtcacaatttgggaatcatttcacctttcaagaaattaaggacagggcacagcgttaaggggggtnttttnc

SEQ ID NO: 944 - DNA, 424 bp, Homo sapiens
  misc_feature (1)...(424): n=a,t,g or c
agagctctagcacatttattcgggagagtaagcctgggaaagactaagggagtggtggcagggagaaaggctgtggggaatcagagcgggtgctcagttgggtcttgaagganannnnnnngnnggtgggaggtgggttnccgaggatatcttggttgaagacttgggggtcaagacaaagggacttagggggatggggtctggttagagttggggagggggcctaggacatccgtgcagagtctggggaggttggggtgggagagtctgtacaagtttggtgttgggtgttctagttggcctggtgtccaagagttggggcagtccgaaaaagggttccagagtctggtgtggctggctggggtttcacggcanaaaatgggctggaaggggcagttgtaaactgtctggttgcaaggnaaag

SEQ ID NO: 945 - DNA, 574 bp, Homo sapiens
  misc_feature (1)...(574): n=a,t,g or c
ttaaaaagtagactatatatatatatatcttcatatatgcctatttacatataaatagatatatatacatatacacgcatctataaattacattctatggagagttctctttcttcctcctatctttggccagggcctctgnttctcctgagaggtggctggtggtggctcctgtgagggaggaaaggcagctgggtgccccctcccccagcccttcccactgatatctgctgcgagttttacattctactttcgttgccatggtttctgtatcctaggagagaggcgatgcgganctccgccagccctgcgagggagggaagcagccccatggcaggttttctgtctgtcctaagagctttctgcatttactgggtgagagagagggcagctgtgcagcgttcggcctccaattccattttaattttgtttctttgtttgtctttcctcaaatatacagtccatcaccttggctccagtgcatgtcaccaaaaattctccagggatttcatagtttggacctcggtggtgtggctngccaggatatccatgcaggangctgcactctganagc

SEQ ID NO: 946 - DNA, 429 bp, Homo sapiens
  misc_feature (1)...(429): n=a,t,g or c
ttgacgttggcagtgacatttatttttctnnggggaggggagttatatacagcagtgacccggagcccctcacccccaccaggcttaggtggggacaggaggcgttggcagaaggcacacagtggcagtagccagaagaggccaggaagtaagggtgggtatgtgatgtgtcctgggagacccagatgaggaaattgaggctcagtgagggcctcaggtcacacagtaaggtgcgaaggagctagtcccgagagcttgtggtggttgcttctctcttgcctgggctacaggaggacgcaggggcagcccccgcccttcttcctgggggcactgggagggctcggtgggagctcttgttcctggtatttccggacagcccgcaccagctgcttcaaaagcctcgtccacgttgagacgcattttggccga

SEQ ID NO: 947 - DNA, 467 bp, Homo sapiens
  misc_feature (1)...(467): n=a,t,g or c
ggtacaaaaggtgtctttattgaggtctgggttaaaattaggcacttggccagagcagcagcttaaatatgaggcaagcagtcaggggttagccatgcctgggnntgggttggggtcatgaggctacaggcacagactgtccccaggtggacagaagttnggagcaggannnnnngnnngnnngggccgcanancagcctgggtcagaggcctggtgggcnagcccagtgggactaggcaggaagctctggtggcaggtccagcagngaggggaccaggatctcttgctccacgtgccccttagacccaggcctgagcctctggnagngggcagccgcacttggcagggcggtcttcccaagcctcacttncttcaccttngcatcgtaggtgccttgcattcttgtaggcgctcacgtagccactgtcgtccaggatgtcctgccgtcccgcaatgcccttgccct

SEQ ID NO: 948 - DNA, 852 bp, Homo sapiens
cttgcagctgcccacctcaccctcagctctggcctcttactcaccctctaccacagacatggctcagtcactggctctgagcctccttatcctggttctggcctttggcatccccaggacccaaggcagtgatggaggggctcaggactgttgcctcaagtacagccaaaggaagattcccgccaaggttgtccgcagctaccggaagcaggaaccaagcttaggctgctccatcccagctatcctgttcttgccccgcaagcgctctcaggcagagctatgtgcagacccaaaggagctctgggtgcagcagctgatgcagcatctggacaagacaccatccccacagaaaccagcccagggctgcaggaaggacaggggggcctccaagactggcaagaaaggaaagggctccaaaggctgcaagaggactgagcggtcacagacccctaaagggccatagcccagtgagcagcctggagccctggagaccccaccagcctcaccaacgcttgaagcctgaacccaagatgcaagaaggaggctatgctcaggggccctggagcagccaccccatgctggccttgccacactctttctcctgctttaaccaccccatctgcattcccagctctaccctgcatggctgagctgcccacagcaggccaggtccagagagaccgaggagggagagtctcccagggagcatgagaggaggcagcaggactgtccccttgaaggagaatcatcaggaccctggacctgatacggctccccagtacaccccacctcttccttgtaaatatgatttatacctaactgaataaaaagctgttctgtcttcccacccgc

SEQ ID NO: 949 - DNA, 1364 bp, Homo sapiens
aggggactggggccaagagccgggagcgcgggcgcaaaggcaccagggcccgcccagggcgccgcgcagcacggccttgggggttctgcgggccttcgggtgcgcgtctcgcctctagccatggggtccgcagcgttggagatcctgggcctggtgctgtgcctggtgggctgggggggtctgatcctggcgtgcgggctgcccatgtggcaggtgaccgccttcctggaccacaacatcgtgacggcgcagaccacctggaagggcctgtggatgtcgtgcgtggtgcagagcaccgggcacatgcagtgcaaagtgtacgactcggtgctggctctgagcaccgaggtgcaggcggcgcgggcgctcaccgtgagcgccgtgctgctggcgttcgttgcgctcttcgtgaccctggcgggcgcgcagtgcaccacctgcgtggccccgggcccggccaaggcgcgtgtggccctcacgggaggcgtgctctacctgttttgcgggctgctggcgctcgtgccactctgctggttcgccaacattgtcgtccgcgagttttacgacccgtctgtgcccgtgtcgcagaagtacgagctgggcgcagcgctgtacatcggctgggcggccaccgcgctgctcatggtaggcggctgcctcttgtgctgcggcgcctgggtctgcaccggccgtcccgacctcagcttccccgtgaagtactcagcgccgcggcggcccacggccaccggcgactacgacaagaagaactacgtctgagggcgctgggcacggccgggcccctcctgccagccacgcctgcgaggcgttggataagcctggggagccccgcatggaccgcggcttccgccgggtagcgcggcgcgcaggctcctcggaacgtccggctctgcgccccgacgcggctcctggatccgctcctgcctgcgcccgcagctgaccttctcctgccactagcccggccctgcccttaacagacggaatgaagtttccttttctgtgcgcggcgctgtttccataggcagagcgggtgtcagactgaggatttcgcttcccctccaagacgctgggggtcttggctgctgccttacttcccagaggctcctgctgacttcggaggggcggatgcagagcccggggcccccaccggaagatgtgtacagctggtctttactccatcggcaggcccgagcccagggaccagtgacttggcctggacctcccggtctcactccagcatctccccaggcaaggcttgtgggcaccggagcttgagagagggcgggagtgggaaggctaagaatctgcttagtaaatggtttgaactctcaaaaaaaaaaaaaaaa

SEQ ID NO: 950 - DNA, 1301 bp, Homo sapiens
gggcacgcgcaccaccgcccgcagcgcagcccgcgcccgcgcaggccccgcagccggcccagcccgccgccaccggccgcggctgcctccagaggacctggtccagacaagatgtgaaatggagaagtatctgacacctcagcttcctccagttcctataattccagagcataaaaagtatagacgagacagtgcctcagtcgtagaccagttcttcactgacactgaagggttaccttacagtatcaacatgaacgtcttcctccctgacatcactcacctgagaactggcctctacaaatcccagagaccgtgcgtaacacacatcaagacagaacctgttgccattttcagccaccagagtgaaacgactgcccctctccggccccgacccaggccctccctgagttcaccagtatattcagctcacaccagaccgcagctccagaggtgaacaatattttcatcaaacaagaacttcctacaccagatcttcatctttctgtccctacccagcagggccacctgtaccagctactgaatacaccggatctagatatgcccagttctacaaatcagacagcagcaatggacactcttaatgtttctatgtcagctgccatggcaggccttaacacacacacctctgctgttccgcagactgcagtgaaacaattccagggcatgcccccttgcacatacacaatgccaagtcagtttcttccacaacaggccacttactttcccccgtcaccaccaagctcagagcctggaagtccagatagacaagcagagatgctccagaatttaaccccacctccatcctatgctgctacaattgcttctaaactggcaattcacaatccaaatttacccaccaccctgccagttaactcacaaaacatccaacctgtcagatacaatagaaggagtaaccccgatttggagaaacgacgcatccactactgcgattaccctggttgcacaaaagtttataccaagtcttctcatttaaaagctcacctgaggactcacactggtgaaaagccatacaagtgtacctgggaaggctgcgactggaggttcgcgcgatcggatgagctgacccgccactaccggaagcacacaggcgccaagcccttccagtgcggggtgtgcaaccgcagcttctcgcgctctgaccacctggccctgcatatgaagaggcaccagaactgagcactgcccgtgtgacccgttccaggtcccctgggctccctcaaatgacagacctaactattcctgtgtaaaaacaacaaccc

SEQ ID NO: 951 - DNA, 6611 bp, Homo sapiens
tgactgcatcacctggtctgtgaattttccattagaagcttggtgtgctgttaggtgaaagacttgctcagctatgcgtcattgggttttatcaacatataggcgaaaaaaatcctggtctctgagtgtacagctgagatgaaaatttcttttattggaggaagtattgagtgtgtgctctcaaatgcggcctcagttgagtagtgcattcctgagttttggaagcaaatttgcaaacaattgagagtcgtacagtgggtgttctaactggattcaggttttttctaatgtaattttttcacacgtaaattaaaaagtttagaaatgtcacacataacttcataacactttatggagaaatggttgtacttttaatttttttctttttatttatactccaactgactgagcagaggttgtacttctaaataactttgtggaagtttttagtaccataatttttataattttcattccagtcctttgatatttatgacagtacttctgaagcgcttactgagtgccggacactgttgtaagtgctttacggaacttgacttttttttttttttgagacggactctcgctctgtcgcccaggctggagtgcagtggtgcagtggctcgatctcggctcactgccacctctccctcatggtttcaaacacttctcctgcctcagcctcccaggtagccaggattatagccgcccgccaccactcccgactaattttattttgtatgttcttttttagtagagacggaggagtttcaccatgttggccaggctggtatcgacctcctgacctcaagtgatgtgtccatctcggcctcccaaggtgctggaattacaggtgtgagccactgtgctcggcctaccttttttttttgttttttgtttttttgaaaaggagtttcgctcttgtccaggctggagtataatggtgcgatctcagctcaccgcaatctccgcctcccagattcaagcgattctcctgcctcagcctcctcaggagctgggattacaggcgcccaccgccatgcccggctaatttttgtatttttagtagagacggggtttcactatattggccaggctggtctcgaactgctgacctcaagtaatccgcctgcctcagcctcccaaagtgctgggattacagacgtgatccaccaggatcacaccaggccgcgcctggcctgctttcattttaaaagtcaaatttgtcatccgcctcagtgcttgtaatcttttctgagtgagatactgaaatttgcagtttcgttttgcttgcacttgttcactggaccagtagtcactgttaaatgtaaaagtatctacttcctctgaaagttttttattcctttatttcctgcctgggcttgtcctccaccctacatgtatgcgtagtagatttagtgtttgttatcctaacctttaggtttagggattgactgggtttctgactttttatttggccaatgaggacgatacagaaaatgaagcattggtcattatcacattttaacgctgaaaaagtaagaaggacaaccccggaataaaatgatatcagtatcaagataaaagtttggaatgggagaaaaattctcaaagcctgaaagaaaatctgtagttacttttggtgacgctgtccagttcccacaatgtatcattccttatctgaaactagacatcctctgcagccagaagaacaagaagtaggcattgaccccttgtccagttactctaacaagtctggaggagattcaaataaaaatggaagaagaacaagttctactttagactctgaagggacttttaattcctataggaaagaatgggaagaactatttgtaaacaacaattacttggcaacaataaggcagaaggggattaatgggcagctgagaagcagcaggttccgcagcatttgctggaagctatttctttgtgttcttcctcaagacaaaagtcaatggataagtagaattgaagaattaagagcatggtatagcaacattaaagaaatacatattaccaacccgaggaaggttgttggccaacaagatttgatgatcaataatcctctttcacaggatgaagggagtctttggaacaaattcttccaagataaagaacttcgatcaatgattgaacaagatgtcaaaagaacgtttcctgaaatgcagtttttccagcaagaaaatgtgagaaaaattcttacagatgttcttttctgttatgccagagaaaacgagcagttgctttataaacagggcatgcacgaactgttagcacctatagtctttgtccttcactgtgaccaccaagcttttctacatgccagtgagtctgcacagcccagtgaggaaatgaaaactgtcttgaaccctgagtatctggaacatgatgcctatgcagtgttctcacaacttatggaaactgctgaaccttggttttcaacttttgagcatgatggtcagaaggggaaagaaacactgatgactcccattccctttgctagaccacaagatttagggccaacaattgctattgttactaaagtcaaccagatccaggatcatctactgaagaagcatgatattgagctttacatgcacttgaacagactagaaattgcaccacagatatatgggttaaggtgggtgcggctgctatttggacgagagttccccctgcaggaccttctggtggtctgggatgccttgtttgcagacggcctcagcctgggtttagtagattatatcttcgtagccatgttactttacatccgagatgctttgatctctagtaactaccagacctgtctcggccttctgatgcattacccattcatcggggatgtacactcactgattcttaaggctctgttccttagagatccaaagagaaatccaagaccagtgacttatcaattccatccaaatttagattattacaaagcacgaggagcagacctcatgaataaaagccggaccaatgccaaaggtgctcccctgaatataaataaggtctctaatagcctgattaattttggaagaaagttgatttccccagcaatggctccaggcagtgcaggtggccctgtacctggaggcaacagcagtagctcctcctctgttgtaattcctaccaggacctcagcagaggccccaagccatcacttgcaacagcaacagcagcagcagaggctgatgaaatcagaaagcatgcctgtgcaattgaacaaagggctaagttctaaaaacatcagttcatctccaagcgttgagagtttgcctggaggaagagaattcactggctctccaccttcatctgctactaaaaaagattccttttttagcaacatctcacgttctcgctcacacagcaaaactatgggcagaaaagaatctgaagaagaattagaagcccaaatttccttccttcaagggcagttgaatgacctggatgccatgtgcaaatactgtgcaaaggtgatggacactcatcttgtaaatattcaagatgtgatattacaagaaaatttggaaaaagaagatcaaattctggtttccctggcaggattaaaacagatcaaagacattctaaaaggttccctgcgttttaaccagagccagctagaggccgaagagaacgaacagatcaccattgcggacaaccactactgctccagcggccagggccagggccgaggccaaggccagagcgttcaaatgtcaggggccattaaacaggcctcttcagaaacgccagggtgcactgatagagggaattccgatgacttcatcctgatttccaaagatgatgatgggagcagtgccaggggctccttctccggccaggcccagcctcttcgcaccctcagaagcacctctgggaaaagccaggccccagtctgctccccactggtgttctcagatccactgatgggcccagcctcagcttcctccagcaaccccagctccagtcctgatgacgacagcagcaaggactctggcttcaccattgtgagtcccctggacatctgaccacagtgcccagtcctgccccacagggatctagccacccttcagtggccccaaggccagactgaggctcatccagtggagaaccttcttaaaccactgcttccttcccggcatgcatttggcattggtccagccctttgaaaccccttagagagaagcatatatggccacaaagcacagaggcttaggtttgccacatgcagacagggctttctgggcccttacctaatccccacccgactcttgctctgagttagagctgagttacgtacccagtatcacactcacagttagaaaagaccgaatcacaatttagaatcacttttcctctgtccccttctccccagctaagaatgtgtggcacctccatcagttatacttagaaggagcagaaatagttattttcgtatcttctatccctcaaagcatcagacatgggaaaattggtttataccaagaaagcttcctctgtggaaatctgtctcagcctactttattcctgcattgggaagccatatcgcagagctaaatgcaatagaatgaaccagaactagtggattccagggctgggggaaaaaaaaaaaagaaaaaacctcattactgacctctcaaagttataaggatctctgcaaacaggatctaagcttaggaataatatttaggtgtgatatagtgttagatttttttgatgtattaaagaatgcatctccaatccttaggccatatcaactttggccatcaatatctctccttaaacaattatatttcaccttttagaatctttcatagccagaaaacaagattactgtaagccagttttagctgcactgatttcaaaagatataagaatattactatccttcaaatggaaaatgcgaccttgactttatgggataaacatctttcagacagtcagttttctagtcaggtttctctggtttcagagctgtatatacctgtcaactgaggaataaagggaaaaacccaagttcattcccacccaaagtcagaatccctcattggccttaaggtagcagtcataagacagagaattggacctagagtcccttctgtggggaataaggatacctagagaacattccacatgccaagaggatgcaggatttctacacaaccccttcccttcttggaagtcaagtgtaggtactgcagggcctgtgctcagctgtgaaccccgtatcctgggccccactgccgggaccgggtctgacatgccagtgccttcctgggctgagcacagattagagactctcccccttgtcagtcagcaccttaggaaaccatgatgggcacagagcatcacatgagctgtttctctccttaaagaagatccctggaaaggatgcttttcctctcctttgcctgcgcaggaattctaacaggagtgggtgaggatggcagagggacacagtgcctgtctcgcctccatcagggagagcagccatgccagggatgactagctctttgagcctgtcctcagaggatggcgaggcagccgggcagtggaggccttcatggtaacaaatgaaagctcagtatagaggaacagacactgtttacgtccctcccactgctaaccttatatatctctatagacaaatgtgataatgacatgatttcccacctgccctccaagaaaatggtgactcactctcaagtcagctactgtagagagggttctaattggttctgcaatttgctcttaaactctagcagggaactctcctcttaccacatcagcatgtaaggtgaataataactctggttttgccagacagcaggttgtctgaccttcaaccactgggcaattgcctggcagatgcacacagtagctccctggcttctggctctgagtgttcctctcagcacctctgagtaagctgctgccaagcacatatccctatgacaacactttgtaaaagccgcggggcccccatacagcgagtgaccttgcaactgtgcagggttgccattggtcactttctcaccttgggaaggtgtcagtgttttcagttctaaggtaagaggtgtagagctgttcccaccagggctctgggacagactggaaaggaccacagacctggccatccctgggcagcagggccagtgtcacctgctgacctctagtatttcctttgccctagagctagagtcatgatagctgagggtcactcgccctgcaagagtcactaggcacccaccatgccaataaggctctccgctggctccctgcagttggctgggtgtttaatagtcactgaaaactcccagccctgctgcacactagaggcaggtcctctcggtcctctccatcctgtgcttctgtggcccccagcaagctcaccgcctccttggaggagagagacatacaaggacagtgggtcatgggtagtaccagcctcaaattcccacaggctcatactcagacaattgtattactgccttatgttttttaagtgtttttttaaattcttcatagttgagtattatttgcaattttattagttacagtgctattaaagaatatgtgctcctttt

SEQ ID NO: 952 - DNA, 1056 bp, Homo sapiens
ttctttttatcattacatcaaattgttttcccaggcttgcgtaatggaatgtgaaggtaaactgccttctctgaaaatttgggaaacctgcaaggagctcctgcagctgtccaaaccagagcttcctcaagatggcaccagcaccctcagagaaaatagcaaaccggaagaaagccatttgctagccaaaaggtatgggggcttcatgaaaaggtatggaggcttcatgaagaaaatggatgagctttatcccatggagccagaagaagaggccaatggaagtgagatcctcgccaagcggtatgggggcttcatgaagaaggatgcagaggaggacgactcgctggccaattcctcagacctgctaaaagagcttctggaaacaggggacaaccgagagcgtagccaccaccaggatggcagtgataatgaggaagaagtgagcaagagatatgggggcttcatgagaggcttaaagagaagcccccaactggaagatgaagccaaagagctgcagaagcgatatgggggcttcatgagaagagtaggtcgcccagagtggtggatggactaccagaaacggtatggaggtttcctgaagcgctttgccgaggctctgccctccgacgaagaaggcgaaagttactccaaagaagttcctgaaatggaaaaaagatacggaggatttatgagattttaatatcttttcccactagtggcccccaggccccagcaagcctccctccatcctccagtgggaaactgttgatggtgttttattgtcatgtgttgcttgccttgtatagttgacttcattgtctggataactatacaacctgaaaactgtcatttcaggttctgtgctctttttggagtctttaagctcagtattagtctattgcagctatctcgtttttcatgctaaaaatagttttttgttatcttgtctcttattttttgacaaacatccaataaatgcttacttgtatatagagataataaacctattaccccaagtgcataatatccttgtaagtctctttttctccaaggctc

SEQ ID NO: 953 - DNA, 1050 bp, Homo sapiens
ttctttttatcattacatcaaattgttttcccaggcttgcgtaatggaatgtgaaggtaaactgccttctctgaaaatttgggaaacctgcaaggagctcctgcagctgtccaaaccagagcttcctcaagatggcaccagcaccctcagagaaaatagcaaaccggaagaaagccatttgctagccaaaaggtatgggggcttcatgaaaaggtatggaggcttcatgaagaaaatggatgagctttatcccatggagccagaagaagaggccaatggaagtgagatcctcgccaagcggtatgggggcttcatgaagaaggatgcagaggaggacgactcgctggccaattcctcagacctgctaaaagagcttctggaaacaggggacaaccgagagcgtagccaccaccaggatggcagtgataatgaggaagaagtgagcaagagatatgggggcttcatgagaggcttaaagagaagcccccaactggaagatgaagccaaagagctgcagaagcgatatgggggcttcatgagaagagtaggtcgcccagagtggtggatggactaccagaaacggtatggaggtttcctgaagcgctttgccgaggctctgccctccgacgaagaaggcgaaagttactccaaagaagttcctgaaatggaaaaaagatacggaggatttatgagattttaatatcttttcccactagtggccccaggccccagcaagcctccctccatcctccagtgggaaactgttgatggtgttttattgtcatgtgttgcttgccttgtatagttgacttcattgtctggataactatacaacctgaaaactgtcatttcaggttctgtgctctttttggagtctttaagctcagtattagtctattgcagctatctcgttttcatgctaaaatagtttttgttatcttgtctcttatttttgacaaacatcaataaatgcttacttgtatatagagataataaacctattaccccaagtgcataatatccttgtaagtctctttttctccaaggctc

SEQ ID NO: 954 - DNA, 1230 bp, Homo sapiens
gaatcaattcctccaaaccgcaagaacagtaacatttattattcaaaaaaacaaaaaccagattataggatatgacatttggtataacaataatgttattgaaaaatggaaaaatgatccattaatggcttgggctaaaaattcgggggacagcctaggggcctggatctattgcctacttagagagaggccaactcagacacagccgtgtatgctcccagcagcaacggaggttcacgtccgcctgcagggacagaaagacatggtctggaaatggatgccacttctgctgcttctggtctgtgtagccaccatgtgcagtgcccaggacaggactgatctcctcaatgtctgtatggatgccaagcaccacaagacaaagccaggtcctgaggacaagctgcatgaccaatgcagtccctggaagaagaatgcctgctgcacagccagcaccagccaggagctgcacaaggacacctcccgcctgtacaactttaactgggaccactgcggcaagatggagcccgcctgcaagcgccacttcatccaggacacctgtctctatgagtgctcacccaacctggggccctggatccagcaggtgaatcagacgtggcgaaaagaacgcttcctggatgtgcccttatgcaaagaggactgtcagcgctggtgggaggattgtcacacctcccacacgtgcaagagcaactggcacagaggatgggactggacctcaggagttaacaagtgcccagctggggctctctgccgcacctttgagtcctacttccccactccagctgccctttgtgaaggcctctggagtcactcatacaaggtcagcaactacagccgagggagcggccgctgcatccagatgtggtttgattcagcccagggcaaccccaacgaggaagtggcgaggttctatgctgcagccatgcatgtgaatgctggtgagatgcttcatgggactgggggtctcctgctcagtctggccctgatgctgcaactctggctccttggctgagttcagtcctcccagactacctgccctcagcttggataaccaggctgggctcagctcagctcccacaaatgacagccccttaagcatgcttctattagtcacctaaccctctgtcacccagtctgttgctgctccatggtggggccaagagtcacttctaataaacagactgttttctaataaaaaaaaaaaaaaaaaaa

SEQ ID NO: 955 - DNA, 2269 bp, Homo sapiens
ccgtttcctcccctcccctccactcggccgtccctccttcctcctccctcctccctcctcctcccgctcctgaagagcgcgccgcgtgggggacggcccggttacttcctccagagactgacgagtgcggtgtcgctccagctcagagctcccggagccgcccggccagcgtccggcctccctgatcgtctctggccggcgccctcgccctcgcccggcgcgcaccgagcagccgcgggcgccgagcagccaccgtcccgaccaagcgccggccctgcccgcagcggcaggatgaatgatttcggaatcaagaatatggaccaggtagcccctgtggctaacagttacagagggacactcaagcgccagccagcctttgacacctttgatgggtccctgtttgctgtttttccttctctaaatgaagagcaaacactgcaagaagtgccaacaggcttggattccatttctcatgactccgccaactgtgaattgcctttgttaaccccgtgcagcaaggctgtgatgagtcaagccttaaaagctaccttcagtggcttcaaaaaggaacagcggcgcctgggcattccaaagaacccctggctgtggagtgagcaacaggtatgccagtggcttctctgggccaccaatgagttcagtctggtgaacgtgaatctgcagaggttcggcatgaatggccagatgctgtgtaaccttggcaaggaacgctttctggagctggcacctgactttgtgggtgacattctctgggaacatctggagcaaatgatcaaagaaaaccaagaaaagacagaagatcaatatgaagaaaattcacacctcacctccgttcctcattggattaacagcaatacattaggttttggcacagagcaggcgccctatggaatgcagacacagaattaccccaaaggcggcctcctggacagcatgtgtccggcctccacacccagcgtactcagctctgagcaggagtttcagatgttccccaagtctcggctcagctccgtcagcgtcacctactgctctgtcagtcaggacttcccaggcagcaacttgaatttgctcaccaacaattctgggactcccaaagaccacgactcccctgagaacggtgcggacagcttcgagagctcagactccctcctccagtcctggaacagccagtcgtccttgctggatgtgcaacgggttccttccttcgagagcttcgaagatgactgcagccagtctctctgcctcaataagccaaccatgtctttcaaggattacatccaagagaggagtgacccagtggagcaaggcaaaccagttatacctgcagctgtgctggccggcttcacaggaagtggacctattcagctgtggcagtttctcctggagctgctatcagacaaatcctgccagtcattcatcagctggactggagacggatgggagtttaagctcgccgaccccgatgaggtggcccgccggtggggaaagaggaaaaataagcccaagatgaactacgagaagctgagccggggcttacgctactattacgacaagaacatcatccacaagacgtcggggaagcgctacgtgtaccgcttcgtgtgcgacctccagaacttgctggggttcacgcccgaggaactgcacgccatcctgggcgtccagcccgacacggaggactgaggtcgccgggaccaccctgagccggccccaggctcgtggactgagtgggaagcccatcctgaccagctgcctccgaggacccaggaaaggcaggattgaaaatgtccaggaaagtggccaagaagcagtggccttattgcatcccaaaccacgcctcttgaccaggctgcctcccttgtggcagcaacggcacagctaattctactcacagtgcttttaagtgaaaatggtcgagaaagaggcaccgggaagccgtcctggcgcctggcagtccgtgggacgggatggttctggctgtttgagattctcaaaggagcgagcatgtcgtggacacacacagactatttttagattttcttttgccttttgcaaccaggaacagcaaatgcaaaaactctttgagagggtaggagggtgggaaggaaacaaccatgtcatttcagaagttagtttgtatatattataataatcttataattgttctcagaatcccttaacagttgtatttaacagaaattgtatattgtaatttaaaataattatataactgtatttgaaataagaattc

SEQ ID NO: 956 - DNA, 640 bp, Homo sapiens
cgcgcgcccgaacgaagccgcggcccgggcacagccatggcccggcgggcggggggcgctcggatgttcggcagcctcctgctcttcgccctgctcgctgccggcgtcgccccgctcagctgggatctcccggagccccgcagccgagccagcaagatccgagtgcactcgcgaggcaacctctgggccaccggtcacttcatgggcaagaagagtctggagccttccagcccatcccattggggacagctccccacacctcccctgagggaccagcgactgcagctgagtcatgatctgctcggaatcctcctgctaaagaaggctctgggcgtgagcctcagccgccccgcaccccaaatccagtacaggaggctgctggtacaaatactgcagaaatgacaccaataataggggcagacacaacagcgtggcttagattgtgcccacccagggaaggtgctgaatgggaccctgttgatggccccatctggatgtaaatcctgagctcaaatctctgttactccattactgtgatttctggctgggtcaccagaaatatcgctgatgcagacacagattatgttcctgctgtatttcctgcttccctgttgaattggtgaataaaaccttgctcttt

SEQ ID NO: 957 - DNA, 1011 bp, Homo sapiens
ggtttattttccagatgcaatcaatgccccagtcacctgctgttataacttcaccaataggaagatctcagtgcagaggctcgcgagctatagaagaatcaccagcagcaagtgtcccaaacaagctgtgatgtgagttcagcacaccaaccttccctggcctgaagttcttccttgtggagcaagggacaagcctcataaacctagagtcagagagtgcactatttaacttaatgtacaaaggttcccaatgggaaaactgaggcaccaagggaaaaagtgaaccccaacatcactctccacctgggtgcctattcagaacacccaatttctttagcttgaagtcaggatggctccacctggacacctataggagcagtttgccctgggttccctccttccacctgcgttcctcctctagctcccatggcagccctttggtgcagaatgggctgcacttctagaccaaaactgcaaaggaacttcatctaactctgtcctccctccccacagcttacagaccattgtggcaaggagatctgtgctgaccccaagcagaagtgggttcaggattccatggaccacctggacaagcaaacccaaactccgaagacttgaacactcactccacaacccaagaatctgcagctaacttatttttccctagctttccccagacaccttgtttattttattataatgaattttgtttgttgatgtgaaacattatgccttaagtaatgttaattcttatttaagttattgatgttttaagtttatctttcatggtactagtgttttttagatacagagacttggggaaattgcttttcctcttgaaccacagttctacccctgggatgttttgagggtctttgcaagaatcattaatacaaagaattttttttaacattccaatgcattgctaaaatattattgtggaaatgaatattttgtaactattacaccaaataaatatatttttgtacaaaaaaaaaaaaaaaaaaaaaa

SEQ ID NO: 958 - DNA, 1031 bp, Homo sapiens
gtctgcccctgcccttgcagatggccaagctgcggagcctcctctccagtgctgagaacgagcccccagtgcctcttgtgagcaactggcgacctccacagcctatcaataacagggtggtgagagcttccttcaaatgaggctgctggatcttgccctcttcaggaaaggaaacctaccattggagagcttggttccttgcctccttctggtgctcttactccaagtctatttcatttttccacactgagcaatgaatgtgagagatgtggtcaccaagatctaagttacttgttgaaagaaagttactttcgacaagatctaatatgaaagcatagatttcacatttgatctctgtaataatcatctttcctataaaagtagcatttttggtaaagtttcaaagaagaagaaacagagatggaagagtaaagatatttttaaaatggctagctattgggcaccagtttttctgttatctaaaatttcacacaacttcatgtttttatttttatattatgagttgtccatcttaaagaaatatgagtaattctacatgtagtagaggtgtatgaagatcatataacaattaaacataagccagaaattaaaatgactatagacagcaagaattgagctaataatatgttttaactcttaacaccagcaagaagtcagtcatttattgaagttttagctactaagattacttggttttgattaccagtgaaaagaaaacacaatacaatcaggagttttcaaatttttgattcagtatttgaatttcttcttcataaatgtagttggaatttatcctagtatttttctttacctgaaggagggccatttatttttaatttcactacatttttctttgcatgattattaaaataaaaactgcctctgttgtgtttctcactggaggctggaatgaatgatcactagaacacaaaagagtgaatgatgacacttgaagtcaaagcagttgtactgatcaccagaaccaataaagacataaatggaaaacgttg

SEQ ID NO: 959 - DNA, 2689 bp, Homo sapiens
ggctggggcctgaggcctggggctcacccacgcccccgccgacgcctgccgcgccgccgccacccccgccacccggagccccgggtggctcgcaggacacctgtacgtcgtgcggcggcttccggcggccagaggagctcggccgagtggacggcgacttcctggaggcggtgaagcggcacatcttgagccgcctgcagatgcggggccggcccaacatcacgcacgccgtgcctaaggccgccatggtcacggccctgcgcaagctgcacgcgggcaaggtgcgcgaggacggccgcgtggagatcccgcacctcgacggccacgccagcccgggcgccgacggccaggagcgcgtttccgaaatcatcagcttcgccgagacagatggcctcgcctcctcccgggtccgcctatacttcttcatctccaacgaaggcaaccagaacctgtttgtggtccaggccagcctgtggctttacctgaaactcctgccctacgtcctggagaagggcagccggcggaaggtgcgggtcaaagtgtacttccaggagcagggccacggtgacaggtggaacatggtggagaagagggtggacctcaagcgcagcggctggcataccttcccactcacggaggccatccaggccttgtttgagcggggcgagcggcgactcaacctagacgtgcagtgtgacagctgccaggagctggccgtggtgccggtgttcgtggacccaggcgaagagtcgcaccgaccctttgtggtggtgcaggctcggctgggcgacagcaggcaccgcattcgcaagcgaggcctggagtgcgatggccggaccaacctctgttgcaggcaacagttcttcattgacttccgcctcatcggctggaacgactggatcatagcacccaccggctactacggcaactactgtgagggcagctgcccagcctacctggcaggggtccccggctctgcctcctccttccacacggctgtggtgaaccagtaccgcatgcggggtctgaaccccggcacggtgaactcctgctgcattcccaccaagctgagcaccatgtccatgctgtacttcgatgatgagtacaacatcgtcaagcgggacgtgcccaacatgattgtggaggagtgcggctgcgcctgacagtgcaaggcaggggcacggtggtggggcacggagggcagtcccgggtgggcttcttccagccccccgcgggaacggggtacacggtgggctgagtacagtcattctgttgggctgtggagatagtgccagggtgcggcctgagatatttttctacagcttcatagagcaaccagtcaaaaccagagcgagaaccctcaactgacatgaaatactttaaaatgcacacgtagccacgcacagccagacgcatcctgccacccacacagcagcctccaggataccagcaaatggatgcggtgacaaatggcagcttagctacaaatgcctgtcagtcggagagaatggggtgagcagccaccattccaccagctggcccggccacgtctcgaagttgcgccttcccgagcacacataaaagcacaaagacagagacgcagagagagagagagagccacggagaggaaaagcagatgcaggggtggggagcgcagctcggcggaggctgcgtgtgccccgtggcttttaccaggcctgctctgcctggctcgatgtctgcttcttcccagcctgggatccttcgtgcttcaaggcctggggagcctgtccttccatgcccttgtcgagggaaagagacccagaaaggacacaacccgtcagagacctgggagcaggggcaatgaccgtttgactgtttgtggcttgggcctctgacatgacttatgtgtgtgtgtgtttttggggtggggagggagggagagaagagggggctaaatttgatgctttaactgatctccaacagttgacaggtcatccttgccagttgtataactgaaaaaggacttttctaccaggtatgaccttttaagtgaaaatctgaattgttctaaatggaaagaaaaaaagttgcaatctgtgcccttcattggggacattcctctaggactggtttggggacgggtgggaatgacccctaggcaaggggatgagaccgcaggaggaaatggcggggaggtggcattcttgaactgctgaggatggggggtgtcccctcagcggaggccaagggaggggagcagcctagttggtcttggagagatggggaaggctttcagctgatttgcagaagttgcccatgtgggcccaaccatcagggctggccgtggacgtggcccctgcccactcacctgcccgcctgcccgcccgcccgcatagcacttgcagacctgcctgaacgcacatgacatagcacttgccgatctgcgtgtgcccagaagtggcccttggccgagcgccgaactcgctcgccctctagatgtccaagtgccacgtgaactatgcaatttaaagggttgacccacactagacgaaactggactcgtacgactctttttatattttttatacttgaaatgaaatcctttgcttcttttttaagcgaatgattgcttttaatgtttgcactgatttagttgcatgattagtcagaaactgccatttgaaaaaaaagttatttttatagcagc

SEQ ID NO: 960 - DNA, 2875 bp, Homo sapiens
gaattctccggagctgaaaaaggatcctgactgaaagctagaggcattgaggagcctgaagattctcaggttttaaagacgctagagtgccaaagaagactttgaagtgtgaaaacatttcctgtaattgaaaccaaaatgtcatttatagatccttaccagcacattatagtggagcaccagtattcccacaagtttacggtagtggtgttacgtgccaccaaagtgacaaagggggcctttggtgacatgcttgatactccagatccctatgtggaactttttatctctacaacccctgacagcaggaagagaacaagacatttcaataatgacataaaccctgtgtggaatgagacctttgaatttattttggatcctaatcaggaaaatgttttggagattacgttaatggatgccaattatgtcatggatgaaactctagggacagcaacatttactgtatcttctatgaaggtgggagaaaagaaagaagttccttttattttcaaccaagtcactgaaatggttctagaaatgtctcttgaagtttgctcatgcccagacctacgatttagtatggctctgtgtgatcaggagaagactttcagacaacagagaaaagaacacataagggagagcatgaagaaactcttgggtccaaagaatagtgaaggattgcattctgcacgtgatgtgcctgtggtagccatattgggttcaggtgggggtttccgagccatggtgggattctctggtgtgatgaaggcattatacgaatcaggaattctggattgtgctacctacgttgctggtctttctggctccacctggtatatgtcaaccttgtattctcaccctgattttccagagaaagggccagaggagattaatgaagaactaatgaaaaatgttagccacaatccccttttacttctcacaccacagaaagttaaaagatatgttgagtctttatggaagaagaaaagctctggacaacctgtcacctttactgacatctttgggatgttaataggagaaacactaattcataatagaatgaatactactctgagcagtttgaaggaaaaagttaatactgcacaatgccctttacctcttttcacctgtcttcatgtcaaacctgacgtttcagagctgatgtttgcagattgggttgaatttagtccatacgaaattggcatggctaaatatggtacttttatggctcccgacttatttggaagcaaattttttatgggaacagtcgttaagaagtatgaagaaaaccccttgcatttcttaatgggtgtctggggcagtgccttttccatattgttcaacagagttttgggcgtttctggttcacaaagcagaggctccacaatggaggaagaattagaaaatattaccacaaagcatattgtgagtaatgatagctcggacagtgatgatgaatcacacgaacccaaaggcactgaaaatgaagatgctggaagtgactatcaaagtgataatcaagcaagttggattcatcgtatgataatggccttggtgagtgattcagctttattcaataccagagaaggacgtgctgggaaggtacacaacttcatgctgggcttgaatctcaatacatcttatccactgtctcctttgagtgactttgccacacaggactcctttgatgatgatgaactggatgcagctgtagcagatcctgatgaatttgagcgaatatatgagcctctggatgtcaaaagtaaaaagattcatgtagtggacagtgggctcacatttaacctgccgtatcccttgatactgagacctcagagaggggttgatctcataatctcctttgacttttctgcaaggccaagtgactctagtcctccgttcaaggaacttctacttgcagaaaagtgggctaaaatgaacaagctcccctttccaaagattgatccttatgtgtttgatcgggaagggctgaaggagtgctatgtctttaaacccaagaatcctgatatggagaaagattgcccaaccatcatccactttgttctggccaacatcaacttcagaaagtacaaggctccaggtgttccaagggaaactgaggaagagaaagaaatcgctgactttgatatttttgatgacccagaatcaccattttcaaccttcaattttcaatatccaaatcaagcattcaaaagactacatgatcttatgcacttcaatactctgaacaacattgatgtgataaaagaagccatggttgaaagcattgaatatagaagacagaatccatctcgttgctctgtttcccttagtaatgttgaggcaagaagatttttcaacaaggagtttctaagtaaacccaaagcatagttcatgtactggaaatggcagcagtttctgatgctgaggcagtttgcaatcccatgacaactggatttaaaagtacagtacagatagtcgtactgatcatgagagactggctgatactcaaagttgcagttacttagctgcatgagaataatactattataagttaggtgacaaatgatgttgattatgtaaggatatacttagctacattttcagtcagtatgaacttcctgatacaaatgtagggatatatactgtatttttaaacatttctcaccaactttcttatgtgtgttctttttaaaaattttttttcttttaaaatatttaacagttcaatctcaataagacctcgcattatgtatgaatgttattcactgactagatttattcataccatgagacaacactatttttatttatatatgcatatatatacatacatgaaataaatacatcaatataaaaataaaaaaaaacggaattc

SEQ ID NO: 961 - DNA, 2542 bp, Homo sapiens
actccaggtggtagtgctcgctctggcgcagattagaggtccaccgggagagcggggccccccgggtcccccgggaccgccgggagtgcctggatccgacggcatcgacggtgacaatgggccccctggaaaagctggccctccgggacccaagggcgagcctggcaaagctgggccagatgggccagacgggaagcccgggattgatggtttaactggagccaagggggagcctggccccatggggatccctggagtcaagggccagcccgggcttcctggtcctcctggccttccgggccctggttttgctggacctcctgggcctcctggacctgttggcctccctggtgagattggaatccgaggccccaagggggaccctggaccagatggaccatcggggcccccaggaccccctgggaaacctggtcgcccgggaaccatccagggtctggaaggcagtgcggatttcctgtgtccaaccaactgtccacccggaatgaaaggtcccccagggctgcagggagtgaaggggcatgcgggcaaacgcgggattctgggtgatcctggccaccaggggaagccgggtcccaagggagatgtgggtgcctctggagagcaaggcatccctggaccaccgggtccccagggcatcaggggctacccaggcatggcagggcccaagggagagacgggccctcatggatataaaggcatggtgggcgctatcggtgccactgggccaccgggtgaggaaggtcctaggggaccgccaggccgagctggggagaagggtgacgagggcagcccaggtattcgtggaccccaggggatcacaggcccgaaaggagcaacgggccccccaggcatcaacggcaaggatgggaccccaggcacgcctggcatgaagggcagtgcaggacaggcgggacagcccggaagtccaggccaccagggcctagcgggtgtgccaggccagcctgggacaaaaggaggccctggagaccagggtgagccgggcccgcagggccttcctggattctctggtccccctgggaaagagggagagccagggcctcgaggagaaattggtccccagggcatcatgggacagaagggtgaccaaggcgagaggggtccagtggggcaaccaggccctcagggaaggcagggccctaagggggagcagggcccccccggaattccagggccccaaggcttgccaggcgtcaaaggagacaagggctccccagggaagaccgggccccgcggcaaagtgggtgacccaggggtggccggcctccccggagagaaaggcgagaagggcgagtccggcgagccggggcccaagggacagcaaggagtacgtggagaacccggctaccctgggcccagcggggatgcgggcgccccaggggttcagggctaccctggtccccccggccctcgaggactggccgggaaccgaggcgtgccaggacagcccgggagacagggcgtggagggccgggatgccactgaccagcacatcgtggatgtggcgctgaagatgctgcaagagcaactggcagaggtcgccgtgagtgccaagcgggaagccctgggtgcggtgggcatgatgggtcctccaggacctcctgggccccctgggtacccaggcaagcagggcccccatgggcaccctggccctcggggcgttcctggcatcgtgggagccgtgggtcagatcggcaacacggggcccaagggaaaacgtggagagaagggtgatccaggagaagtgggacgggggcaccccgggatgcctgggcccccagggatcccaggacttcctggccggcctggccaggcaatcaacggcaaggatggagatcgagggtccccaggggctccaggagaggcaggtcgacctggcctgccaggccccgtggggctgccgggcttctgtgaacctgccgcctgccttggagcttcggcctatgcctctgcccgccttacagagcctggatccatcaaggggccttgagcatcaggcccagacagagcctggcaggcatcctggcgggaaggaccaggtcccctctggtggacatgcacccatccccagtccaggaaaccatctcccccaggaccttctgtctgggactcaggagtcctaaggaaaaggaattctaaaacatgggggaaggggaggtagagcactgatgggtgaaaaagtgaggccaacacacagggcaagtggtgtcgatggagtcgaagcgctgaaggaatagggcggctttccttccagcgagcatcattcggctgttaccaaaacaaacatcttaatctgcaccttcctccactggccatcttgtccttgggtcagtgggacatgggcacctcgggaggcccgggccctgcccagctacagttccacccctcagcttgaggaccaatactgaggtctatgccagttcctgatcccatctcactctctggacctactaggtgactgctgctggggtgactcccctgaggcggctatacccttaagcca

SEQ ID NO: 962 - DNA, 450 bp, Homo sapiens
gtgactgtgaggactgtggataacctgctggaggtgtctgcccggcacccccagcgcctggaccgccacggcttcgtgtcccgagagttctgccgcacctatgtcctgcctgctgatgtcgacccctggcgagtccgagctgctctctcccatgatggcatcttaaacctggaagcacctcggggtggccgacatttggacacagaggtcaatgaggtctacatctccctgctccctgcgcctcctgatccagaggaagaggaggaggcagccatagttgagccctgattgccacagacccagcacccagcaaatccctctctacctcccaaggtgatatggccagctgcccaccactccagaggtagcagcatccttgggggaagggaaaggtgcatggtccacaatgtatggtttggtcccatgggacatgtcatagccttggtttag

SEQ ID NO: 963 - DNA, 1435 bp, Homo sapiens
ttgtaacagaaaattaaaatatactccactcaagggaattctgtactttgcccttttggtaaagtctcatttacatttctaaacctttcttaagaaaatcgaatttcctttgatctctcttctgaattgcagaaatcagataaaaactacttggtgaaatgacttcttgtcacattgctgaagaacatatacaaaaggttgctatctttggaggaacccatgggaatgagctaaccggagtatttctggttaagcattggctagagaatggcgctgagattcagagaacagggctggaggtaaaaccatttattactaaccccagagcagtgaagaagtgtaccagatatattgactgtgacctgaatcgcatttttgaccttgaaaatcttggcaaaaaaatgtcagaagatttgccatatgaagtgagaagggctcaagaaataaatcatttatttggtccaaaagacagtgaagattcctatgacattatttttgaccttcacaacaccacctctaacatggggtgcactcttattcttgaggattccaggaataactttttaattcagatgtttcattacattaagacttctctggctccactaccctgctacgtttatctgattgagcatccttccctcaaatatgcgaccactcgttccatagccaagtatcctgtgggtatagaagttggtcctcagcctcaaggggttctgagagctgatatcttggatcaaatgagaaaaatgattaaacatgctcttgattttatacatcatttcaatgaaggaaaagaatttcctccctgcgccattgaggtctataaaattatagagaaagttgattacccccgggatgaaaatggagaaattgctgctatcatccatcctaatctgcaggatcaagactggaaaccactgcatcctggggatcccatgtttttaactcttgatgggaagacgatcccactgggcggagactgtaccgtgtaccccgtgtttgtgaatgaggccgcatattacgaaaagaaagaagcttttgcaaagacaactaaactaacgctcaatgcaaaaagtattcgctgctgtttacattagaaatcacttccagcttacatcttacacggtgtcttacaaattctgctagtctgtaagctccttaagagtagggttgtgccttattcaactgcatacatagctcctagcacagtgccttattcggtaggcatctaagcaaatttcttaaattaattaatatatctttaaagatatcatattttatgtatgtagcttattcaaagaagtgtttcctatttctatatagtttattatacatgatacttgggtagctcaacattcttaataaacagcctttgtattcagaatataaaattgaaatagatatatataaagttaaaaaaaaaaaaaaaaaa

SEQ ID NO: 964 - DNA, 2330 bp, Homo sapiens
aaaggaccgaggcgtgcagcggacagcagatggatcccgcggccagcagctgcatgaggagcctccagcccccagcccctgtctggggctgccttcgaaacccccactcggaaggcaatggggcctcagggctaccccactacccgcccaccccgttctccttccaccagaaaccagacttcctggcgacagcgacggcagcgtaccctgacttctcagcctcctgcctggcagccaccccacacagcctgccccaggaggagcacatcttcactgagcagcaccccgctttcccacagtcccccaactggcacttccctgtctcagacgcccggcgcaggcccaactcaggcccggcagggggttccaaggaaatggggaccagcagcctgggcctggtggacaccacaggaggcccaggcgatgactacggggtgcttgggagcactgccaatgagacagagaagaaatcatccaggcggagaaaggagagttcagacaaccaggagaacagagggaagccggagggcagcagcaaagcccgcaaggagaggacggccttcaccaaggagcagctgcgagagctggaggcagagtttgcccatcataactacctgactcggctccgcagatatgagattgcggtaaacctggacctctctgagcgccaggtcaaagtgtggttccagaaccgaaggatgaagtggaagcgtgtgaagggaggtcagcccatctcccccaatgggcaggaccctgaggatggggactccacagcctctccaagttcagagtgagattctgcatggaggaaaaatgactaaggactgagccccctacccaactacccccaccccaatcccaccttcaccctcttccttccccagccagggcagcctctccacatctttccctgactcttggatatgaaactgcccagcattcctgggagtcttaggattttctaggaagttctgtccagcctcttagcagcctcttccctagggcctttgctcccacactctcatggaatcagacagagatcctaccgggccggatgaatctggaaacagcttcagagatactgcttctcagcgtctcttggctgccacccatgcctcctcctaccgctgttctcctaggtcagccaggcctcctcctggtctggacaccacctggcctggtgggagaggagctttggaaccagctggcgactcggaaagtaaatgcttcaaaaggaaggaaatgacagagacacacgcccttgcccaccttcctctgtaggctgcacatctgaggctttggggccccttagttgtcccgaaaccccaagaaaaatcagaatgaggagagtcaaggacagcaactcagctgctgcaagccagaaacacatccctgtctccaaatttgttggctaagtggagacacttctgagaactgactagagaagacaagaaaatagcccgatgtaggtttcggtgtccccatataggccccgtccacacaggcttgactgggtggacaagaatgaacccatgacagcacctgctgcttcaaaatcaaaatcaatttagggatacagcaggggctgttgggctgtgctccagagaaaaggagcagctactccttttaaatccacgatttctggattgaaaacctgtccagatgctgagttgttgggctgaacaactaggagctgaaaacaacgtagaggctggaaagtgtcccctgcattctggaggggaggggagataataaggagggctgctgggtgagggcctggagatgtggaaccctggagtggaaggtttctccagtgacagtgtcctgtgacwgcaaaagggrasaagaaaatccctcttcctccatgggatggatttaagctcttgctgtgtgttctacaaatgctgttattgtgggaggaaatgctaggtttttgtgtgtggactgcccagacctcagccaggtcttctggagatgacatttgaggactgatggccaaagagcatgggggactgaagccctggctgcctcagcgctctgtctcccaacaccagctggtgttgcagagggaggtcaacgtgagtttggatctcttgtacgcagatgtaatcattcacatgtaaaaataaccccacctccccaccccaaaaagggcaagagctgtggaaaatgattgccaaatgagatggctggttagagcatgattttttctaaagcatacttcatatattttcttaagattacatcaagctaattgtgcgagctcaattcactttgtaagaaaactctcggagaaataaaatcaataaaaagccaaaaaaaaaaataag

SEQ ID NO: 965 - DNA, 1358 bp, Homo sapiens
cctgccctggaagcggatcgaagtgatggccctgcccaaaccgggcggggcccacagcctagccctggtgacagtgcccagcatgggctatgctcctgttcctccccccacctcactgcagcccctgctgccccagcagcctgtgttcgtagtgcaagagactgatggctccgtgactctggacaatggcatcatccgagtgaagctggacccaactggtcgcctgacgtccttggtcctggtggcctctggcagggaggccattgctgagggcgccgtggggaaccagtttgtgctatttgatgatgtccccttgtactgggatgcatgggacgtcatggactaccacctggagacacggaagcctgtgctgggccaggcagggaccctggcagtgggcaccgagggcggcctgcggggcagcgcctggttcttgctacagatcagccccaacagtcggcttagccaggaggttgtgctggacgttggctgcccctatgtccgcttccacaccgaggtacactggcatgaggcccacaagttcctgaaggtggagttccctgctcgcgtgcggagttcccaggccacctatgagatccagtttgggcacctgcagcgacctacccactacaatacctcttgggactgggctcgatttgaggtgtgggcccatcgctggatggatctgtcagaacacggctttgggctggccctgctcaacgactgcaagtatggcgcgtcagtgcgaggcagcatcctcagcctctcgctcttgcgggcgcctaaagccccggacgctactgctgacacggggcgccacgagttcacctatgcactgatgccgcacaagggctctttccaggatgctggcgttatccaagctgcctacagcctaaacttccccctgttggctctgccagcccccagcccagcgcccgccacctcctggagtgcgttttccgtgtcttcacccgcggtcgtattggagaccgtcaagcaggcggagagcagcccccagcgccgctcgctggtcctgaggctgtatgaggcccacggcagccacgtggactgctggctgcacttgtcgctgccggttcaggaggccatcctctgcgatctcttggagcgaccagaccctgctggccacttgacttcgggacaaccgcctgaagctcaccttttctcccttccaagtgctgtccctgttgctcgtgcttcagcctccgccacactgagtccctggggctggggttttgtttgtagaaggctctggggactcctaatttctgcttccccagcctaaagcagggatcagtcttttcttgtggaataaatccttggatcgggaaaaaaaaaaa

SEQ ID NO: 966 - DNA, 1303 bp, Homo sapiens
ctgccaatgagctccgccgagtagcaccggggcagggctagcgcttaaaggagccgcgacccctttgcagaccagagggtgacccggatgatggcggccggcgcggccctagccctggccttgtggctactaatgccaccagtggaggtgggaggggcggggcccccgccaatccaggacggtgagttcacgttcctgttgccggcggggaggaagcagtgtttctaccagtccgcgccggccaacgcaagcctcgagaccgaataccaggtgatcggaggtgctggactggacgtggacttcacgctggagagccctcagggcgtgctgttggtcagcgagtcccgcaaggctgatggggtacacacggtggagccaacggaggccggggactacaagctgtgctttgacaactccttcagcaccatctccgagaagctggtgttctttgaactgatctttgacagcctccaggatgacgaggaggtcgaaggatgggcagaggctgtggagcccgaggagatgctggatgttaaaatggaggacatcaaggagtccattgagaccatgcggacccggctggagcgcagcatccagatgctcacgctactgcgggccttcgaggcacgtgaccgcaacctgcaagagggcaacttggagcgggtcaacttctggtcagctgtcaacgtggcggtgctgctgctggtggctgtgctgcaggtctgcacgctcaagcgcttcttccaggacaagcgcccggtgcccacgtagcccctgccatggaaggaagaacgggacaaaggaggggcagcagggtgtgtgcatatgagacttgggggtccctccccaattttagtttcctgccaaaacgggagtgtgcagtcagggcctgcggtctggccccatgagtctccttccgtcctcagcgggcagggaacacctctggcttgtagaagggacggctcagtggctgcaccgacggtcctggaaatctcacatggtgggcactgcagcgttggaacgtgagcctcggatttcctggcccctctactgtaaatgtgccttagcctaagcctcccatcctgtgttagcgttgcctggtgcggggcagggcctaacaaggaaacctgggccctccaagccaggttgaggtctggtaacagaatgccaggaagggggcctggaagaccacctgccccggcccctctcctgcaggggccccacacaggcatgagggatggcccggccaaagtctaggcagaagcctcctataacaaagggtggtgtggcctgggcattggag

SEQ ID NO: 967 - DNA, 1539 bp, Homo sapiens
gtgaagggagccgggatcagccaggggccagcatgagccggagggagggaagtctggaagacccccagactgattcctcagtctcacttcttccccacttggaggccaagatccgtcagacacacagccttgcgcacctcctcaccaaatacgctgagcagctgctccaggaatatgtgcagctccagggagaccccttcgggctgcccagcttctcgccgccgcggctgccggtggccggcctgagcgccccggctccgagccacgcggggctgccagtgcacgagcggctgcggctggacgcggcggcgctggccgcgctgcccccgctgctggacgcagtgtgtcgccgccaggccgagctgaacccgcgcgcgccgcgcctgctgcgccgcctggaggacgcggcgcgccaggcccgggccctgggcgccgccgtggaggccttgctggccgcgctgggcgccgccaaccgcgggccccgggccgagccccccgccgccaccgcctcagccgcctccgccaccggggtcttccccgccaaggtgctggggctccgcgtttgcggcctctaccgcgagtggctgagccgcaccgagggcgacctgggccagctgctgcccgggggctcggcctgagcgccgcggggcagctcgccccgcctcctcccgctgggttccgtctctccttccgcttctttgtctttctctgccgctgtcggtgtctgtctgtctgctcttagctgtctccattgcctcggccttctttgctttttgtgggggagaggggaggggacgggcagggtctctgtcgcccaggctggggtgcagtggcgcgatcccagcactgcagcctcaacctcctgggctcaagccatccttccgcctcagcttccccagcagctgggactacaggcacgcgccaccacagccggctaattttttatttaattttttgtagagacgaggtttcgccatgttgcccaggctggtcttgaactccggggctcaagcgatcctcccgcttcagcctccctaagtgctgggattgcaggcgtgagccactttcccagcctctctttgctttgcctgccccgttctcttaactcttggaccctcctcgtctgcatggtaactccgtctgagtctaccattttcttgctctccctccttccttgggcctgcctcagttccctttggcctccccctttacccagctcttggggtgtctctgttttttccatccccacttcctgccttctcgtggccctgtgtgagcacatgtgtacatctcagccttatctcaaggaggtgacaccttctctccttgtccccatctggccgtctctctgtgcttccctggccaggggcgtgcctgctggtcctatggggggaaggctactccgcatctcagccaccttcctcaggctcactccacctacatccccagtctgccacaccccatccctttgggcctcagccctgtccctttgatgtcctcctttccttcagcccctctgccctgtccctgcacacctcc

SEQ ID NO: 968 - DNA, 1443 bp, Homo sapiens
ctgcggtcagcgcacgtgcccgcgagacctgcaaacttgtgccaccggctctgcccgtccccggggagcccgaacgccccgcagccctcacccctcccgccagtctccagccatgggctgctttgaatgctgcatcaagtgtctgggaggagtcccctacgcctccctggtggccaccatcctctgcttctccggggtggccttattctgcggctgtgggcatgtggctctcgcaggcaccgtggcgattcttgagcaacacttctccaccaacgccagtgaccatgccttgctgagcgaggtgatacaactgatgcagtatgtcatctatggaattgcgtcctttttcttcttgtatgggatcattctgttggcagaaggcttttacaccacaagtgcagtgaaagaactgcacggtgagtttaaaacaaccgcttgtggccgatgcatcagtggaatgttcgttttcctcacctatgtgcttggagtggcctggctgggtgtgtttggtttctcagcggtgcccgtgtttatgttctacaacatatggtcaacttgtgaagtcatcaagtcaccgcagaccaacgggaccacgggtgtggagcagatctgtgtggatatccgacaatacggtatcattccttggaatgctttccccggaaaaatatgtggctctgccctggagaacatctgcaacacaaacgagttctacatgtcctatcacctgttcattgtggcctgtgcaggagctggtgccaccgtcattgccctgctgatctacatgatggctactacatataactatgcggttttgaagtttaagagtcgggaagattgctgcactaaattctaaattgcataaggagttttagagagctatgctctgtagcatgaaatatcactgacactccagactaaagcagagtctaggtttctgcaattttgttacagtaatttgtaaatagctttagtaaactcaccttgcatggtagattaataagatgacttactgtacatgaattacacaataatgagatctggtggctatttccacattttgaaaaggattcagttatttactgacagtggtgagcatcctttttaaaataatgttctgatacttaaacattagagagcagtatctttaaatgaattattaacactttggaatacttacattttctgttatttttgattgcctgataaccagtttcaatgatgaaaatgaaaacaagtgctgaagatgaaatggaagagaaccgttttaatctggattttgttttgtcacacctggaaaatactttgcaaatatgttctaaattgaaaacaatttttttatgatcacatggttcactaccaaatgaccctcaaataagccagatgaaaatttgaagaaaaaggtcacccagttctctggaaaaaaaaaaaaaaaaaaaaaaaaaa

SEQ ID NO: 969 - DNA, 1551 bp, Homo sapiens
  misc_feature (1)...(1551): n=a,t,g or c
ctctttcagccttctgcaatctagttctacttagtcacacacttctctaagaccactcatacgtaaacactacgtagaggcccctttttgcctcattttacattgtttagttatcattttgaaacttttcttcacatatgtaacagtgccggagtttttctgcttctctgtgtttgttcagtaactcttctttaggatacacctaaagatgagaagcttcatacccagtactcctcttcattcactcatatgtttttgggatcagtcccttctgctggctgtgcattggtctaatggaacagaatagagtccagaaataacccaacatgtatgtggacaactggtttttgacagaggtgcaaaggtcttgaaaaaatgatgctggaataattgggcatcagatgcaaaattaaaaacaaattggtccatatcttaacactggcaaagattaaagtccaaatggattatagttccccaaaactgtataatttctagaagacaacaaggaaaacgtgttcagccttgggttaggaaaagatttcttaaatccaacaccaaaagcacaatccatgaaggaaaaatcgataaattgtacttnatcaaaattgagaacttctctttgaaaggtaccataaggagaacaaaaagacaagctgtagagtggcagaaaaatatttgnaaaacatttctgataaatgagtcgcatctagattacataaagaagtctcaaaactgaacaaagtaaaacccattgttgacttaatgcgctgtttcctcctgagcttgctgcctctgcccctgctctctctccttttccatttgttttcaacattgaatccagaatgttcttcttgagatccaagtcagatcacaccaaccctcagaactctccaatagacgaccatggcactcaaaagtccacaatagccttcaatgctgggcaaaacatgaagcaccccttttctcccttctctgaccccatcacctctgtgttcaccctgctcctgccgtcctccctgcctccaaaacaggtcaggccttcgtgcctttgcacttactatttgcaataccccaaatgttcttcaggctctttagcctcttcatttcttttcctgaagtgtcatctcactgaggcttatctaaagctgcagctactggggcattcctgtctcatctccctgctgtattttgtactcccggctctcttttgtacttttaaacatacctatatggtttacctttgttgtttatatttgcatgttgtttcccacttgaatgtaagctccaaagattttatttttttaaactgaattattactgtattcccagaacaattccctggcaaatatttggtactcaatagtaatgctaagttagtaaataaatgatgaatttagaatcaaaataacgtgtctatggccaaaataaaacctgaaatccctgtcctatttcccagaggtaactgctgttaatagtttagttgtgtgcttccagacataccttcacagaatcatttatcacaataaaggtgtcatactatgcaaaaaaaaa

SEQ ID NO: 970 - DNA, 853 bp, Homo sapiens
agtggcaccgctgactgccgagaggaagctcgcctctgcccggctgccctcttgtagtccgccggcgaggggcagttctcggtgaggaggaagagagcagcggacggcacagcacccgcgcgggccctcccacaacagctccagctggcagcatcacttcccgccaatttatccaacttctgccaaggctctgaaatgccaacaacgtcgaggcctgcacttgatgtcaagggtggcacctcacctgcgaaggaggatgccaaccaagagatgagctccgtggcctactccaaccttgcggtgaaagatcgcaaagcagtggccattctgcactaccctggggtagcctcaaatggaaccaaggccagtggggctcccactagttcctcgggatctccaataggctctcctacaaccacccctcccactaaacccccatccttcaacctgcaccccgcccctcacttgctggctagtatgcagctgcagaaacttaatagccagtatcaggggatggctgctgccactccaggccaacccggggaggcaggacccctgcaaaactgggactttggggcccaggcgggaggggcagaatcactctctccttctgctggtgcccagagccctgctatcatcgattcggacccagtggatgaggaagtgctgatgtcgctggtggtggaactggggttggaccgagccaatgagcttccggagctgtggctggggcagaatgagtttgacttcactgcggactttccatctagctgctaatgccaagtgtccctaaagatggaggaataaagccaccaattctgttgtaaataaaaataaagttacttacaaagag

SEQ ID NO: 971 - DNA, 4240 bp, Homo sapiens
cagcagagctggattggggtgttgagtccaggctgagtagggggcagcccactgctcttggtccctgtgcctgctgggggtgccctgccctgaactccaggcagcggggacagggcgaggtgccaccttagtctggctggggaggcggacgatgaggagtgatggggcaggcatgcggccactccatcctctgcaggagccagcagtacccggcagcgcgaccggctgagccgcggggccagcaggtcttcctcaagccggacgagccgccgccgccgccgcagccatgcgccgacagcctgcaggacgccttgctgagtctgggctctgtcatcgacatttcaggcctgcaacgtgctgtcaaggaggccctgtcagctgtgctcccccgagtggaaactgtctacacctacctactggatggtgagtcccagctggtgtgtgaggaccccccacatgagctgccccaggaggggaaagtccgggaggctatcatctcccagaagcggctgggctgcaatgggctgggcttctcagacctgccagggaagcccttggccaggctggtggctccactggctcctgatacccaagtgctggtcatgccgctagcggacaaggaggctggggccgtggcagctgtcatcttggtgcactgtggccagctgagtgataatgaggaatggagcctgcaggcggtggagaagcataccctggtcgccctgcggagggtgcaggtcctgcagcagcgcgggcccagggaggctccccgagccgtccagaaccccccggaggggacggcggaagaccagaagggcggggcggcgtacaccgaccgcgaccgcaagatcctccaactgtgcggggaactctacgacctggatgcctcttccctgcagctcaaagtgctccaatacctgcagcaggagacccgggcatcccgctgctgcctcctgctggtgtcggaggacaatctccagctttcttgcaaggtcatcggagacaaagtgctcggggaagaggtcagctttcccttgacaggatgcctgggccaggtggtggaagacaagaagtccatccagctgaaggacctcacctccgaggatgtacaacagctgcagagcatgttgggctgtgagctgcaggccatgctctgtgtccctgtcatcagccgggccactgaccaggtggtggccttggcctgcgccttcaacaagctagaaggagacttgttcaccgacgaggacgagcatgtgatccagcactgcttccactacaccagcaccgtgctcaccagcaccctggccttccagaaggaacagaaactcaagtgtgagtgccaggctcttctccaagtggcaaagaacctcttcacccacctggatgacgtctctgtcctgctccaggagatcatcacggaggccagaaacctcagcaacgcagagatctgctctgtgttcctgctggatcagaatgagctggtggccaaggtgttcgacgggggcgtggtggatgatgagagctatgagatccgcatcccggccgatcagggcatcgcgggacacgtggcgaccacgggccagatcctgaacatccctgacgcatatgcccatccgcttttctaccgcggcgtggacgacagcaccggcttccgcacgcgcaacatcctctgcttccccatcaagaacgagaaccaggaggtcatcggtgtggccgagctggtgaacaagatcaatgggccatggttcagcaagttcgacgaggacctggcgacggccttctccatctactgcggcatcagcatcgcccattctctcctatacaaaaaagtgaatgaggctcagtatcgcagccacctggccaatgagatgatgatgtaccacatgaaggtctccgacgatgagtataccaaacttctccatgatgggatccagcctgtggctgccattgactccaattttgcaagtttcacctatacccctcgttccctgcccgaggatgacacgtccatggccatcctgagcatgctgcaggacatgaatttcatcaacaactacaaaattgactgcccgaccctggcccggttctgtttgatggtgaagaagggctaccgggatcccccctaccacaactggatgcacgccttttctgtctcccacttctgctacctgctctacaagaacctggagctcaccaactacctcgaggacatcgagatctttgccttgtttatttcctgcatgtgtcatgacctggaccacagaggcacaaacaactctttccaggtggcctcgaaatctgtgctggctgcgctctacagctctgagggctccgtcatggagaggcaccactttgctcaggccatcgccatcctcaacacccacggctgcaacatctttgatcatttctcccggaaggactatcagcgcatgctggatctgatgcgggacatcatcttggccacagacctggcccaccatctccgcatcttcaaggacctccagaagatggctgaggtgggctacgaccgaaacaacaagcagcaccacagacttctcctctgcctcctcatgacctcctgtgacctctctgaccagaccaagggctggaagactacgagaaagatcgcggagctgatctacaaagaattcttctcccagggagacctggagaaggccatgggcaacaggccgatggagatgatggaccgggagaaggcctatatccctgagctgcaaatcagcttcatggagcacattgcaatgcccatctacaagctgttgcaggacctgttccccaaagcggcagagctgtacgagcgcgtggcctccaaccgtgagcactggaccaaggtgtcccacaagttcaccatccgcggcctcccaagtaacaactcgctggacttcctggatgaggagtacgaggtgcctgatctggatggcactagggcccccatcaatggctgctgcagccttgatgctgagtgatcccctccaggacacttccctgcccaggccacctcccacagccctccactggtctggccagatgcactgggaacagagccacgggtcctgggtcctagaccaggacttcctgtgtgaccctggacaagtactaccttcctgggcctcagctttctcgtctgtataatggaagcaagacttccaacctcacggagactttgtaatttgcttctctgagagcacaggggtgaccaatgagcagtgggccctactctgcacctctgaccacaccttggcaagtctttcccaagccattctttgtctgagcagcttgatggtttctccttgccccatttctgccccaccagatctttgctcctttccctttgaggactcccaccctttgggtctccaggatcctcatggaaggggaaggtgagacatctgagtgagcagagtgtggcatcttggaaacagtccttagttctgtgggaggactagaaacagccgcggcgaaggccccctgaggaccactactatactgatggtgggattgggacctgggggatacaggggccccaggaagaagctggccagaggggcagctcagtgctctgcagagaggggccctggggagaagcaggatgggattgatgggcaggagggatccccgcactgggagacaggcccaggtatgaatgagccagccatgcttcctcctgcctgtgtgacgctgggcgagtctcttcccctgtctgggccaaacagggagcgggtaagacaatccatgctctaagatccattttagatcaatgtctaaaatagctctatggctctgcggagtcccagcagaggctatggaatgtttctgcaaccctaaggcacagagagccaaccctgagtgtctcagaggccccctgagtgttccccttggcctgagccccttacccattcctgcagccagtgagagacctggcctcagcctggcagcgctctcttcaaggccatatccacctgtgccctggggcttgggagaccccataggccgggactcttgggtcagcccgccactggcttctctctttttctccgtttcattctgtgtgcgttgtggggtgggggagggggtccacctgccttacctttctgagttgcctttagagagatgcgtttttctaggactctgtgcaactgtcgtatatggtcccgtgggctgaccgctttgtacatgagaataaatctatttctttctaccaaaaaaaaaaaaaaaaaaa

SEQ ID NO: 972 - DNA, 1953 bp, Homo sapiens
cgctcccacccgcccgtggcccgcgcccatggccgcgcgcgctccacacaactcaccggagtccgcgccctgcgccgccgaccagttcgcagctccgcgccacggcagccagtctcacctggcggcaccgcccgcccaccgccccggccacagcccctgcgcccacggcagcaatcgaggcgaccgcgacagtggtgggggacgctgctgagtggaagagagcgcagcccggccaccggacctacttactcgccttgctgattgtctatttttgcgtttacaacttttctaagaacttttgtatacaaaggaactttttaaaaaagacgcttccaagttatatttaatccaaagaagaaggatctcggccaatttggggttttgggttttggcttcgttttttctcttcgttgactttggggttcaggtgccccagctgcttcgggctgccgaggaccttctgggcccccacattaatgaggcagccacctggcgagtctgacatggctgtcagcgacgcgctgctcccatctttctccacgttcgcgtctggcccggcgggaagggagaagacactgcgtcaagcaggtgccccgaataaccgctggcgggaggagctctcccacatgaagcgacttcccccagtgcttcccggccgcccctatgacctggcggcggcgaccgtggccacagacctggagagcggcggagccggtgcggcttgcggcggtagcaacctggcgcccctacctcggagagagaccgaggagttcaacgatctcctggacctggactttattctctccaattcgctgacccatcctccggagtcagtggccgccaccgtgtcctcgtcagcgtcagcctcctcttcgtcgtcgccgtcgagcagcggccctgccagcgcgccctccacctgcagcttcacctatccgatccgggccgggaacgacccgggcgtggcgccgggcggcacgggcggaggcctcctctatggcagggagtccgctccccctccgacggctcccttcaacctggcggacatcaacgacgtgagcccctcgggcggcttcgtggccgagctcctgcggccagaattggacccggtgtacattccgccgcagcagccgcagccgccaggtggcgggctgatgggcaagttcgtgctgaaggcgtcgctgagcgcccctggcagcgagtacggcagcccgtcggtcatcagcgtcagcaaaggcagccctgacggcagccacccggtggtggtggcgccctacaacggcgggccgccgcgcacgtgccccaagatcaagcaggaggcggtctcttcgtgcacccacttgggcgctggaccccctctcagcaatggccaccggccggctgcacacaacttccccctggggcggcagctccccagcaggagtaccccgaccctgggttttgaggaagtgctgagcagcagggaatgtcaccctgccctgccgcttcctcccggcttccatccccacccggggcccaattacccatccttcctgcccgatcagatgcagccgcaagtcccgccgctccattaccaagagctcatgccacccggttcctgcatgccagaggagcccaagccaaagaggggaagacgatcgtggccccggaaaaggaccgccacccacacttgtgattacgcgggctgcggcaaaacctacacaaagagttcccatctcaaggcacacctgcgaacccacacaggtgagaaaccttaccactgtgactgggacggctgtggatggaaattcgcccgctcagatgaactgaccaggcactaccgtaaacacacggggcaccgcccgttccagtgccaaaaatgcgaccgagcattttccaggtcggaccacctcgccttacacatgaagaggcatttttaaatcccagacagtggatatgacccacactgccagaaga

SEQ ID NO: 973 - DNA, 990 bp, Homo sapiens
ggctgtgccaggtgcacatttagcacccgttgccttctctaggagccgctcctagcttgccttatcacatccacgtgacccctcagagcacagcagcttctgattctccatcctattttcttctcttgactgatacatttgggcacttctagggaattcagaaaccaagggaaggggggaagtgctggcttttgctcctgcccagctgaaaggcttgaaaacagttcagtaattctgggcaggtttctctccttaaattaaaatccaatatgggcccctctgtacttaacattccaaatgctcattccaaacactttgccaacgaaggcaaacagtagagaagttaaatacagtgctgcccttgaggctctccaagggaaaggcgaatgaatattctccaggccctctgcttattcctctctgcctattgtgaaggcaatcaggccagactattgagggcatctggcagcaggactcaggcaggtatgaagtagccagccacaagtgtgaaaaggaagagtgctgagagaaactgcctagtcatgtgatatccctaatgcactgtgctttcttccctcaagaaccaccccttctggttccgctgcatgtacatgctgatctggggcaagtttgtgctgtacaaatatgtcacctgttggctggtcacagaaggagtatgcattttgacgggcctgggcttcaatggctttgaagaaaagggcaaggcaaagtgggatgcctgtgccaacatgaaggtgtggctctttgaaacaaacccccgcttcactggcaccattgcctcattcaacatcaacaccaacgcctgggtggcccggtgagctgctggtggggagcctggaccctggttccttccttccactgtcttcccagattggagggcaggggtgtaccatgtcacccctatgcgtctttcccatctgggcagaaccccctgtcgctcacactgactttgacccccacctatacccc

SEQ ID NO: 974 - DNA, 1198 bp, Homo sapiens
cctttatgtctagcacatttgatgaaataaaaaacttctgaatctgaatagaagttctactgtttcaggcttgaaccttttacatgctcaagagattcaaatggtctctgtgtgtagatcatgccaccgcctccaaagcctaatccacatcacttctgagaggcaaggctgagcatatggtgacatcagctctgtgttgagatggtgatgaggatgatggctcgctggccaggcagggcagccgaaggtcagggacctgtcctaactaactgcagccttgcctttagtgtttgtcattctcagatacaacacggtatgtccagtgtccgtttttattactttaaagcatttgagggcttaattgtgtatagtagaaatactattttagacaaataattatctgtgtacagatatttgatatactctaagtaaattttctaatttcactaagtacgtttttaggctcctctcaaatactgcgtattgaagaaaaaaatctgacaccaccgagccaaagatgcttttttgtctgttttcgttgtttaacagaatggaaagagtaatgcatagtgcttcctggtgtctcctgattgattgattgtgcacaaagtaggacgataaataaataaaatggagtctgatgggacattgattaaaggtgaaggatgattgatatatagatcatgaaaagaaaaatgaatggcaggaaaaaaagtttggtccttaatatactttggcctagttaaaatatgtgcctttttggtgtgttttgttcatcactacaagataaaaaggaaacattacaactcaagtctttaaaaagttcatttattgaaaatcatatgtataacctagcatacgaatgagcagatttaaacacataacttcaagccatttctgaaaacatacaccaggagctctgctcagctagagtcagactccagctccagcccgactgcgtgcggggacagcgcccgcgttgatgaggaccagccccactgcaggctgaggcggtgtcaccctgggaaggtcgtggtgcgttgtggcatattaagtctaaaccagatgaatgtaaatatctctttgtaaatcatttatttcactctgttccatccaggtcagcaatcagattgtggcatgctgggtaactggaaaaaataataaaaagtaagtttcaataaaaaaaaaaaaaaaaaaa

SEQ ID NO: 975 - DNA, 3881 bp, Homo sapiens
gctgaagtgttcgaccagcaggaggttttctcctcagcccactcgctgcatccagatcagctcaccccgcgccctttcctgcccaccaggactctgatagcccctggcagccacagcccattttgccaagatgtctagagtagccaaatatcgccggcagtgagtgaagaccccgacatcgacagcctgctgggaccctgtctcccgaggagatggaggagctggagaaggagctggacgtggtggacccagacgggagtgttcccgtggggctgcggcagagaaaccagacggagaaacagtccacgggtgtgtacaaccgggaggccatgctcaacttctgtgaaaaggagaccaagaaacttatgcagagggagatgtccatggatgaaagcaagcaagtggagaccaagacagatgccaagaatggacaggaaaggggcagagatgccagcaaaaaagccctgggccccagacggaactcagatctggggaaggagccaaagaggggtggtttaaagaaaagcttctctagagacagagatgaagctggtggcaagagtggcgagaagcccaaggaggagaagatcatccggggcattgacaagggccgggtcagggctgcagtggataagaaggaggcagggaaggatgggagaggagaggagagggcagtggccaccaagaaggaagaggagaagaaagggggtgacaggaacacaggcttgagcagggacaaggataaaaagagagaggagatgaaggaggtggccaagaaagaggatgatgagaaggtaaaaggggagcgtaggaacacagacaccagaaaagagggtgagaagatgaaaagagcaggtgggaacacagacatgaaaaaggaggatgagaaggtaaaaagaggaactgggaacacagacaccaaaaaggacgatgaaaaagtcaagaagaatgaacccttacatgaaaaggaagccaaggatgacagcaagaccaaaacacccgagaaacagacgcccagtggccccaccaagccctctgaaggaccggccaaggtggaggaggaggcagctcccagcatatttgatgagcctctggagagagtgaagaacaatgaccccgagatgactgaggtgaacgtcaacaactcagactgcatcacaaatgagatcttggtccggtttactgaggctctggagttcaacactgtggttaagctgttcgccttggccaacacgcgagccgatgaccacgtggcctttgccattgccatcatgctcaaggccaacaagaccatcaccagcctcaacctggactccaaccacatcacaggcaaaggcatcctggccatcttccgggccctcctccagaacaacacgctgaccgagctccgcttccacaaccagcgacacatctgtggaggcaagacggagatggagatcgccaagctgctgaaggagaatacctccctgctcaagctgggctaccattttgagctggccgggccccgaatgactgtcaccaatctgctcagccgcaacatggacaagcagagacaaaagcggctgcaggagcaaaggcaggcacaggaagccaagggagagaagaaggatctgctggaggtacccaaggccggggccgtggctaagggctccccaaaaccttcacctcaaccatctccaaagccctctccaaagaactcacccaaaaaagggggtgctccagctgccccaccaccccctccccctcccttggctccaccccttatcatggagaacctgaagaattcactctcaccagctacccagaggaagatgggagacaaagtcctccctgcccaggagaagaactcccgtgaccagctattggctgccatccgctccagcaacctcaagcagctcaagaaggtggaagtgcccaaactgcttcagtaggaccaggctgccaggcaccatctgccaatgccatgactgctcaggcctcacctcccagggctacacagaccctgcccaccccatccctggctgacctgctgtggatgtccctattctgccatgggagcgtccaggcctgggtcacgctcaaggaaggatgccttatctcttctcactttccttttcttgtctctgaggctctccaaattttgctttagtacatggagctcaggtttctggacaagaagagtccttttagcacatcactgagaagatggcactgtccagggcccatgtagctggcaagctgcaaaaggcctgtgatccaggaaagatgtcccacagggaccacatccaccccagccccactgccctccagggccaggattcaggcctctgaggagcccacggggcaaagctgctgggccagtggcactctgtgtgggaaaatggcagaaagatggagaggcatgggggcccaaaggggagcgtggggaggggctgaggataccccaaagtccaggctaattagaggatgtggcaggggcagtggcctggatgcacagtgcctgatgggagtaggctccagacaggaggagtgggacagacagcagctggacttgaaggtttgatgccaaagcagacattttcctcacacccacctgctgctgtatgaatagctgtgtatctgtttttccataagattttgataatatatacaaacctttagctgtgaatggctgtgccccacctgttgtcctgaactgtgagtcctgatcctaaccctgggctccctggaggactctagaagctcaggttccctgccacactatttgagttggccaagaaataaattcacatcctcagaaagtgcagcatggaggaaaatctgaactctaagcagaagactctccactgacctggttgtccaggtctagaaggccaggcctctactaggtctgctcctgaaccagtcctgctgcctggagtcagtagccagagttgttctcaggggtgctggggcagagtggagcccagggtgctgggatggctatattaggcatgttcagggatgctcattccatgactctgcctaaccatgggctcagggccaggtcctcacagcagtcacaggcccaggaaggcggcaggcagagaagtggagtgactatttggagaatagcacccatatctgtgtgccctagggctcagaggggcctcatcttccccagccctccccacctgctcaccaattccacttcctgccccaactgcaggaatgctgacaatgctgccatgcccaccatcgggtgtaggtgaaaggcatctttctgaatttcattctcttgaaggtgctgccaccccttggcactgtggaactgccaccttgggtctgtgtcacttgtaggtttctctgcctccaggttgcctcaacagcaggaggcacagcagtttcaccatctttgaggtgagggtggggtgccccagctaggaagcaagatcgctgtgctaggtctgaccaaaaccagagggcagtctagtcctgggggtaaagccctcagatcccagggtacactcttctccattccctccacccacttgcctgtcaccccagtcacctaagcaatcactgggcccagaggagaggagacagacacacactggctcctggacctaaagggtatgagctggagctaaggccagctagagcttccactgtcagccctcactgtcagccccactgcacccccctgtgcctgctgggcactgggcactagctagatgctttaggttgcttcagctgatccttcaactctgtgaggtggataccaatattctattttgcagatagaatttggcccagagaggttaactaatatatccatgatcacacagctaataaaagtcagagctcaggaaaaaaaaaaaaaaaaaaaaaaaaaaaaaaaa

SEQ ID NO: 976 - DNA, 874 bp, Homo sapiens
gggcgggaagacgtgcagcctgggccgtggctgctcactgcgttcggacccagacccgctgcaggcagcagcagcccccgcccgcgcacgagcatggagctctggggggcctacctcctcctctgcctcttctccctcctgacccaggtcaccaccgagccaccaacccagaagcccaagaagattgtaaatgccaagaaagatgttgtgaacacaaagatgtttgaggagctcaagagccgtctggacaccctggcccaggaggtggccctgctgaaggagcagcaggccctgcagacggtctgcctgaaggggaccaaggtgcacatgaaatgctttctggccttcacccagacgaagaccttccacgaggccagcgaggactgcatctcgcgcgggggcaccctgagcacccctcagactggctcggagaacgacgccctgtatgagtacctgcgccagagcgtgggcaacgaggccgagatctggctgggcctcaacgacatggcggccgagggcacctgggtggacatgaccggcgcccgcatcgcctacaagaactgggagactgagatcaccgcgcaacccgatggcggcaagaccgagaactgcgcggtcctgtcaggcgcggccaacggcaagtggttcgacaagcgctgccgcgatcagctgccctacatctgccagttcgggatcgtgtagccggcggggcgggggccgtggggggcctggaggagggcaggagccgcgggaggccgggaggagggtggggaccttgcagcccccatcctctccgtgcgcttggagcctctttttgcaaataaagttggtgcacgttcgcggagaggaaaaaaaaaaaaaaaaaaaaaaaaaa

SEQ ID NO: 977 - DNA, 857 bp, Homo sapiens
gaattccgagagaagacctgactggcacgaggaaaggtgcaataatgaagagttttcttctagttgtcaatgccctggcattaaccctgccttttttggctgtggaggttcaaaaccagaaacaaccagcatgccatgagaatgatgaaagaccattctatcagaaaacagctccatatgtcccaatgtattatgtgccaaatagctatccttattatggaaccaatttgtaccaacgtagaccagctatagcaattaataatccatatgtgcctcgcacatattatgcaaacccagctgtagttaggccacatgcccaaattcctcagcggcaatacctgccaaatagccacccacccactgtggtacgtcgcccaaacctgcatccatcatttattgccatccccccaaagaaaattcaggataaaataatcatccctaccatcaataccattgctactgttgaacctacaccagctcctgccactgaaccaacggtggacagtgtagtcactccagaagctttttcagagtccatcatcacgagcacccctgagacaaccacagttgcagttactccacctacggcataaaaacaccaaggaaatatcaaagaacacaacgcaggacttgctgaaaccaaattactacttcacactctccttcagccatttgtctgccttcagtcaacagaaaatgtgattttcacagattcagctcttctctccttacattttacattcatgccacattcaatattttgattcttgcacaataaagccaactgattgcaaaaaaaaaaaaaaaaaaaaaaaaaaaaaaaaaaaaaaaaaaaaaaaaaaaaaaaaccggaattc

SEQ ID NO: 978 - DNA, 3742 bp, Homo sapiens
gaattccttctctcctcctcctcgcccttctcctcgccctcctcctcctcctcgccctcccctcccgatcctcatccccttgccctcccccagcccagggacttttccggaaagtttttattttccgtctgggctctcggagaaagaagctcctggctcagcggctgcaaaactttcctgctgccgcgccgccagcccccgccctccgctgcccggccctgcgccccgccgagcgatgagcgcccctccggtcctgcggccgcccagtccgctgctgcccgtggcggcggcagctgccgcagcggccgccgcactggtcccagggtccgggcccgggcccgcgccgttcttggctcctgtcgcggccccggtcgggggcatctcgttccatctgcagatcggcctgagccgtgagccggtgctgctgctgcaggactcgtccggggactacagcctggcgcacgtccgcgagatggcttgctccattgtcgaccagaagttccctgaatgtggtttctacggaatgtatgataagatcctgctttttcgccatgaccctacctctgaaaacatccttcagctggtgaaagcggccagtgatatccaggaaggcgatcttattgaagtggtcttgtcacgttccgccacctttgaagactttcagattcgtccccacgctctctttgttcattcatacagagctccagctttctgtgatcactgtggagaaatgctgtgggggctggtacgtcaaggtcttaaatgtgaagggtgtggtctgaattaccataagagatgtgcatttaaaatacccaacaattgcagcggtgtgaggcggagaaggctctcaaacgtttccctcactggggtcagcaccatccgcacatcatctgctgaactctctacaagtgcccctgatgagccccttctgcaaaaatcaccatcagagtcgtttattggtcgagagaagaggtcaaattctcaatcatacattggacgaccaattcaccttgacaagattttgatgtctaaagttaaagtgccgcacacatttgtcatccactcctacacccggcccacagtgtgccagtactgcaagaagcttctgaaggggcttttcaggcagggcttgcagtgcaaagattgcagattcaactgccataaacgttgtgcaccgaaagtaccaaacaactgccttggcgaagtgaccattaatggagatttgcttagccctggggcagagtctgatgtggtcatggaagaagggagtgatgacaatgatagtgaaaggaacagtgggctcatggatgatatggaagaagcaatggtccaagatgcagagatggcaatggcagagtgccagaacgacagtggcgagatgcaagatccagacccagaccacgaggacgccaacagaaccatcagtccatcaacaagcaacaatatcccactcatgagggtagtgcagtctgtcaaacacacgaagaggaaaagcagcacagtcatgaaagaaggatggatggtccactacaccagcaaggacacgctgcggaaacggcactattggagattggatagcaaatgtattaccctctttcagaatgacacaggaagcaggtactacaaggaaattcctttatctgaaattttgtctctggaaccagtaaaaacttcagctttaattcctaatggggccaatcctcattgtttcgaaatcactacggcaaatgtagtgtattatgtgggagaaaatgtggtcaatccttccagcccatcaccaaataacagtgttctcaccagtggcgttggtgcagatgtggccaggatgtgggagatagccatccagcatgcccttatgcccgtcattcccaagggctcctccgtgggtacaggaaccaacttgcacagagatatctctgtgagtatttcagtatcaaattgccagattcaagaaaatgtggacatcagcacagtatatcagatttttcctgatgaagtactgggttctggacagtttggaattgtttatggaggaaaacatcgtaaaacaggaagagatgtagctattaaaatcattgacaaattacgatttccaacaaaacaagaaagccagcttcgtaatgaggttgcaattctacagaaccttcatcaccctggtgttgtaaatttggagtgtatgtttgagacgcctgaaagagtgtttgttgttatggaaaaactccatggagacatgctggaaatgatcttgtcaagtgaaaagggcaggttgccagagcacataacgaagtttttaattactcagatactcgtggctttgcggcaccttcattttaaaaatatcgttcactgtgacctcaaaccagaaaatgtgttgctagcctcagctgatccttttcctcaggtgaaactttgtgattttggttttgcccggatcattggagagaagtctttccggaggtcagtggtgggtacccccgcttacctggctcctgaggtcctaaggaacaagggctacaatcgctctctagacatgtggtctgttggggtcatcatctatgtaagcctaagcggcacattcccatttaatgaagatgaagacatacacgaccaaattcagaatgcagctttcatgtatccaccaaatccctggaaggaaatatctcatgaagccattgatcttatcaacaatttgctgcaagtaaaaatgagaaagcgctacagtgtggataagaccttgagccacccttggctacaggactatcagacctggttagatttgcgagagctggaatgcaaaatcggggagcgctacatcacccatgaaagtgatgacctgaggtgggagaagtatgcaggcgagcagcggctgcagtaccccacacacctgatcaatccaagtgctagccacagtgacactcctgagactgaagaaacagaaatgaaagccctcggtgagcgtgtcagcatcctctgagttccatctcctataatctgtcaaaacactgtggaactaataaatacatacggtcaggtttaacatttgccttgcagaactgccattattttctgtcagatgagaacaaagctgttaaactgttagcactgttgatgtatctgagttgccaagacaaatcaacagaagcatttgtattttgtgtgaccaactgtgttgtattaacaaaagttccctgaaacacgaaacttgttattgtgaatgattcatgttatatttaatgcattaaacctgtctccactgtgcctttgcaaatcagtgtttttcttactggagcttcattttggtaagagacagaatgtatctgtgaagtagttctgtttggtgtgtcccattggtgttgtcattgtaaacaaactcttgaagagtcgattatttccagtgttctatgaacaactccaaaacccatgtgggaaaaaaatgaatgaggagggtagggaataaaatcctaagacacaaatgcatgaacaagttttaatgtatagttttgaatcctttgcctgcctggtgtgcctcagtatatttaaactcaagacaatgcacctagctgtgcaagacctagtgctcttaagcctaaatgccttagaaatgtaaactgccatatataacagatacatttccctctttcttataatactctgttgtactatggaaaatcagctgctcagcaacctttcacctttgtgtatttttcaataataaaaaatattcttgtcaaaaaaaaaaaaa

SEQ ID NO: 979 - DNA, 2224 bp, Homo sapiens
cagagccgcaagcgcagggaaggcctccccgcacggtgggggaaagcggccggtgcagcgcggggacaggcactcgggctggcactggctgctagggatgtcgtcctggataaggtggcatggacccgccatggcgcggctctggggcttctgctggctggttgtgggcttctggagggccgctttcgcctgtcccacgtcctgcaaatgcagtgcctctcggatctggtgcagcgacccttctcctggcatcgtggcatttccgagattggagcctaacagtgtagatcctgagaacatcaccgaaattttcatcgcaaaccagaaaaggttagaaatcatcaacgaagatgatgttgaagcttatgtgggactgagaaatctgacaattgtggattctggattaaaatttgtggctcataaagcatttctgaaaaacagcaacctgcagcacatcaattttacccgaaacaaactgacgagtttgtctaggaaacatttccgtcaccttgacttgtctgaactgatcctggtgggcaatccatttacatgctcctgtgacattatgtggatcaagactctccaagaggctaaatccagtccagacactcaggatttgtactgcctgaatgaaagcagcaagaatattcccctggcaaacctgcagatacccaattgtggtttgccatctgcaaatctggccgcacctaacctcactgtggaggaaggaaagtctatcacattatcctgtagtgtggcaggtgatccggttcctaatatgtattgggatgttggtaacctggtttccaaacacatgaatgaaacaagccacacacagggctccttaaggataactaacatttcatccgatgacagtgggaagcagatctcttgtgtggcggaaaatcttgtaggagaagatcaagattctgtcaacctcactgtgcattttgcaccaactatcacatttctcgaatctccaacctcagaccaccactggtgcattccattcactgtgaaaggcaaccccaaaccagcgcttcagtggttctataacggggcaatattgaatgagtccaaatacatctgtactaaaatacatgttaccaatcacacggagtaccacggctgcctccagctggataatcccactcacatgaacaatggggactacactctaatagccaagaatgagtatgggaaggatgagaaacagatttctgctcacttcatgggctggcctggaattgacgatggtgcaaacccaaattatcctgatgtaatttatgaagattatggaactgcagcgaatgacatcggggacaccacgaacagaagtaatgaaatcccttccacagacgtcactgataaaaccggtcgggaacatctctcggtctatgctgtggtggtgattgcgtctgtggtgggattttgccttttggtaatgctgtttctgcttaagttggcaagacactccaagtttggcatgaaaggttttgttttgtttcataagatcccactggatgggtagctgaaataaaagaaaagacagagaaaggggctgtggtgcttgttggttgatgctgccatgtaagctggactcctgggactgctgttggcttatcccgggaagtgctgcttatctggggttttctggtagatgtgggcggtgtttggaggctgtactatatgaagcctgcatatactgtgagctgtgattggggaacaccaatgcagaggtaactctcaggcagctaagcagcacctcaagaaaacatgttaaattaatgcttctcttcttacagtagttcaaatacaaaactgaaatgaaatcccattggattgtacttctcttctgaaaagtgtgctttttgaccctactggacatttattgacttaattgcttctgtttattaaaattgacctgcaaagttaaaaaaaaattaaagttgagaacaggtataagtgcacactgaatagtctaatctacatgtaacacatattttagtatgattttctatactctaatcagcactgaattcagagggtttgactttttcatctataacacagtgactaaaagagttaagggtatatataccatcactttgggacttggtagtattattaaaaggttatttccttcactgtcaataaaagtccaaatgtttagcttaggtctgagagtcaaacaatgttaaggattgtcttaaagttccttagc

SEQ ID NO: 980 - DNA, 3573 bp, Homo sapiens
  misc_feature (1)...(3573): n=a,t,g or c
tctagacanataaaaataaaagaaatcatccaagaatggtgacttgcctactattctactcgagaggctgagaggggaggatttcttgagcccaggagtttgaggatgcagtgagctatgatcacatcactgtacttcagcctgagcaacagcaagatcctgtctcaaaaaattaaattaggctgggcttggtggctcatgcctgtaatcccagcactttggaaggccatggtgggcagattgcttgagcccaggagtttgagacgaggtgggcaacatgacgaaaccccggctctaccaaaaaatacaaaaaattaactgggcataatggtacatgtctgtggtcccagctactcggtaggctgaggtgggaggaatgcttgagcccaggaaataggggctacagtgaaccaggatgatgccagtgcactccaacctgggcaacagagcaagactctacctcaaaataatttaaaaaaatggattaattgggaataggtggcttgtgcctgtagtcccagttactcaggaggctgaggtgggaggattgcctgagtctaggaggttgaggctgcagtgagccgggatggtaccattgcactccacctgggaacagggtgagaccctgtctcaaaaaagaaaaaaaagggaggggttataatcactcctcctgacatgatacagagtatccatttgagttcataacataaatatgtacttggtgaatgctctgtaactattggtgaatgctctgtaactattggcttttttattgttcccattttacatataaggaagctgaggctttgtgaggagaaatagcttagcccaggtcatccagtgggaagcgtctggtgaagaggaatagtgatcatggtgggactttgcctagcctaaggttcagcatacaatattcagtcagtactcaagggctgggctgtttctggtaatcaaagggctgccttgtcctcctgccccacagcaggaaattccaaggtggttttctttacaggctcctccgcttctgtggccagaggggacagcggaggagcccaggtacctaagccaactcaagagaagatggaattgaatatttcaaccaccttatctaggcctctgtgattgttgaggagggggctgtcactgggaaagttgtgagctgctttggaccttatctgggaatttccttgggcttacagcctttaccctatccttgaaatggttctggtttcatagcaacttctaggtggtgtgggcgaagtttgggactggtttagggcggggacaagaccaagaacacaagtttccttgtactagggagagagggaggggaggaaattggagaccccagcacccccttgctcactctcttgctcacagtccacgatggcccggtccctggtgtgccttggtgtcatcatcttgctgtctgccttctccggacctggtgtcaggggtggtcctatgcccaagctggctgaccggaagctgtgtgcggaccaggagtgcagccgtaagaatggggaggggtagaattgggcttgggtgttagcctgtgtggatgtgctgcattccccttctattccttccctagaccctatctccatggctgtggcccttcaggactacatggcccccgactgccgattcctgaccattcaccggggccaagtggtgtatgtcttctccaagctgaagggccgtgggcggctcttctggggaggcagcgtgcgtcttgggagagtgaaagagggaagggtacagagctggggtagactcattatccccatgaagggaagatttgaggggggtgaactgaaatagacattgtggggggatattgttacttactttattttatttgcttattattttttaattttttccgagacagagtcttgctctgtcacccaggctggatgcaatggcacgatctcggctcactgtaacctccacctcttgggtttaagcgattctccagcctcagcctcccaagtacctgggattacaggcatgcaccaccacacctnntaatttttgtatttttagtagagacagggttttaccatattggccaggctggtcttgaactcctgacctcatgatctgcccgccttggctcccggagtgctgggattacaggtgtgagccactggccccccagcctattttcactttatttaccaattttaggacctgatatggtcccannntctgttctagatctagacaccaagatacaacaacaaatgatcctttttattctaatggagggaaatgaacaaaaagcaaggcataaaaaatagcagcagccgggcacagtagctcacacctgtaatcccaagtaaggccaagtnnggaggatagcttgagcccaggagttcgagaccagcctgggcaacatagcaagacccccatctctataaaaaaaaatttaaaattaactgggcatcatggcatgtgtctgtggtcccggctactcgggaggctgaggtgggaggattgcttgatcccagaagttgaggctgcagtgagccgtgatcatgctactgcacctcaacctggccgacacaatgagaccctgtttccaaaataataataataaaagcaaatatgcgctgctgtgagaattaacagagacttacttgggtgttcagaaagggcctctgaacaggtggcatttaagctgagattcatatgacaaggatggagcagttatgtggagatcagggagaggggagaatgcaaaggccttcagcaggcacaagcttgccatcttccagaccctagcttttaactcctcttccccaggttcagggagattactatggagatctggctgctcgcctgggctatttccccagtagcattgtccgagaggaccagaccctgaaacctggcaaagtcgatgtgaagacagacgtgagtgtcatgggggctggcaagaaatgtggggggaggacccttaggttgtggggatgggcaaaaatgctcccacacttggctccctggccgcctaggtatgtgcgctgggagaaattctttccctgcctcaattttctcaccagtaaaatgggtccagttgggaggtgcaaagattagagggctctaggctaatttgcatagcanntgtgtggccagacctgggccctgcagctgcagcctttgctaaaaccactagatcctttgtggtgtgaccgctggttttctttccactgtttcccctttctctttttcagaaatgggatttctactgccagtgagctcagcctaccgctggccctgccgtttcccctccttgggtttatgcaaatacaatcagcccagtgcaaacggctcgtctccgtggtctttggggtggggtagggtagggtggggactgtacaaatgaaatgtttctctaggttgctgaatctaaccaattaacccgctgcctgtggtaacgtcagtggttgctaggcagagtttcgctgatgaaagccctgtgcagtaggagcgctcctaagcttaggtttcgacacaagcaaagaaaacctaagcagcccaactagggattgtagtgtcctctctaga

SEQ ID NO: 981 - DNA, 1130 bp, Homo sapiens
tgagagtccggctcaggctccggctgcggctccagcccgcgatgccccattccgtgaccctgcgcgggccttcgccctggggcttccgcctggtgggccgggacttcagcgcgcccctcaccatctcacgggtccatgctggcagcaaggcctcattggctgccctgtgcccaggagacctgatccaggccatcaatggtgagagcacagagctcatgacacacctggaggcacagaaccgcatcaagggctgccacgatcacctcacactgtctgtgagcaggcctgagggcaggagctggcccagtgcccctgatgacagcaaggctcaggcacacaggatccacatcgatcctgagatccaggacggcagcccaacaaccagcaggcggccctcaggcaccgggactgggccagaagatggcagaccaagcctgggatctccatatggaaaacccccttgctttccagtccctcacaatggcagcagcgaggccaccctgccagcccagatgagcaccctgcatgtgtctccaccccccagcgctgacccagcagaggcctcccgcggagccgggagcagagtcgacctgggctccgaggtgtacaggatgctgcgggagccggccgagcccgtggccgcggagcccaagcagtcaggctccttccgctacttgcagggcatgctagaggccggcgagggcggggattggcccgggcctggcggcccccggaacctcaagcccacggccagcaagctgggcgctccgctgagcggcctgcaggggctgcccgagtgcacgcgctgctgccacggaatcgtgggcaccatcgtcaaggaacgggacaagctctaccatcccgagtgcttcatgtgcagtgactgcggcctgaacctcaagcagcgtggttacttctttctggacgagcggctctactgtgagagccacgccaaggcgcgcgtgaagccgcccgagggctacgacgtggtggcggtgtaccccaatgccaaggtggaactcgtctgagctgggaccctgctcccacccctgcttcttaaggtccctgctcggccggtgtaaatatgtttcaccctgtccctctaataaagctcctctgctcaaaaaaaa

SEQ ID NO: 982 - DNA, 1457 bp, Homo sapiens
tccgttgctgtcggcgcgcggcggcccgggcgggggaagctggcgggctgaggcgccccgctcttctcctctgccccgggcccgcgaggccacgcgtcgccgcacgagagatgatgcaggacgtgtccagctcgccagtctcgccggccgacgacagcctgagcaacagcgaggaagagccagaccggcagcagccgccgagcgcgaagcgcggggcacgcaagcggcgcagcagcaggcgcagcgcgggcggcggcgcggggcccggcggagccgcgggtggggccgtcggaggcggcgacgagccgggcagcccggcccagggcaagcgcggcaagaagtctgcgggctgtggcggcggcggcggcgcgggcggcggcggcggcggcggcggcggcagcagcagcggcggcgggagtccgcagtcttacgaggagctgcagacgcagcgggtcatggccaacgtgcgggagcgccagcgcacccagtcgctgaacgaggcgttcgccgcgctgcggaagatcatccccacgctgccctcggacaagctgagcaagattcagaccctcaagctggcggccaggtacatcgacttcctctaccaggtcctccagagcgacgagctggactccaagatggcaagctgcagctatgtggctcacgagcggctcagctacgccttctcggtctggaggatggagggggcctggtccatgtccgcgtcccactagcagcggagccccccaccccctcagcagggccggagacctagatgtcattgtttccagagaaggagaaaatggacagtctagagactctggagctggataactaaaaataaaaatatatgccaaagattttcttggaaattagaagagcaaaatccaaattcaaagaaacagggcgtggggcgcacttttaaaagagaaagcgagacaggcccgtggacagtgattcccagacgggcagcgcaccatcctcacatcctctgcattctgatagaagtctgaacagttgtttgtgtttttttttttttttttttgacgaagaatgtttttatttttatttttttcatgcatgcattctcaagaggtcgtgccaatcatcagccactgaaaggaaaggcatcactatggactttctctattttaaaatggtaacaatcagaggaactataagaacacctttagaaataaaaatactgggatcaaactggcctgcaaaaccatagtcagttaattctttttttcatccttcctctgaggggaaaaacaaaaaaaaacttaaaatacaaaaaataacattctatttatttattgaggacccatggtaaatgcaatagtccggtgtctaaatgcattcatatttttatgattgttttgtaaatatctttgtatatttttctgcaataaataaatataaaaaatttagagaaaaaaaaaaaaaaaaaaaaaaaa

SEQ ID NO: 983 - DNA, 1296 bp, Homo sapiens
ccggcgcctgggttggcgctgcggggcggaggcggtgtctgagcgccgctccggctctgctctctctcgagcttcggcacccgcccgagccgctcgcgcgcccgccacctgtctgcccactcggctgtctgtctgccctcccgccgccagctcctgcctcgggcctgccctctccggtctcggtgctccgaggggcgacgagaagcgcgacggggccgtggcgcaccgggcagggcgcgcggggcgcacggcctgggggcgcacggtgcggcgccggcccatgaggctttccagcgcggggagcggcagcgccggccggccatggggggtagcctgcgggtggccgttctaggcgccccgggcgtgggcaagacggccatcatccgccagttcctgttcggtgactaccccgagcgccaccggcccacggacgggccgcgcctctaccgacccgcggtgctgctcgacggcgccgtctacgacttgagcatccgcgacggcgacgtcgctggccccggctcgagccccgggggtccggaggagtggccagacgctaaggactggagcttgcaggacacggacgccttcgtgctcgtctacgacatctgcagcccggacagtttcgactacgtgaaggccctgcggcagcgcatcgcggagaccaggccggcgggcgcgcccgaagcgcccatcctcgtggtaggcaacaagcgggacaggcagcggctgcgcttcggaccgcggcgcgcgctggccgccctagtgcgcaggggctggcgctgcggctacctcgagtgctccgccaagtacaactggcacgtgctgcgtctcttccgcgagctgctgcgctgcgctctggtgcgcgcgcgccctgcacacccggccctgcgcctgcagggggcgctgcatcccgcgcgctgcagcctcatgtgacccgatcggacagtgccatccatgggccccaccttgtgactgggacaatcagggacctggattggacgggatcgcccaacttcactgggactggacagggaagtctccgccctgattggatgaggaaagctccaacccagtctcctaagcgactggcccccttttgaacctcattggacccaaccaggtcccaagctccattggagatgaccagtcctttctgggacctcaatgggtcacaatcccattggatggaaaggacttggctatgaacttgactggaaacacgcagcctgctcctggagcttcactggacatattctttatgccacacctaccacgggataataaaagggaaaataa

SEQ ID NO: 984 - DNA, 838 bp, Homo sapiens
gaattccggagttttcatccagccacgggccagcatgtctgggggcaaatacgtagactcggagggacatctctacaccgttcccatccgggaacagggcaacatctacaagcccaacaacaaggccatggcagacgagctgagcgagaagcaagtgtacgacgcgcacaccaaggagatcgacctggtcaaccgcgaccctaaacacctcaacgatgacgtggtcaagattgactttgaagatgtgattgcagaaccagaagggacacacagttttcacggcatttggaaggccagcttcaccaccttcactgtgacgaaatactggttttaccgcttgctgtctgccctctttggcatcccgatggcactcatctggggcatttacttcgccattctctctttcctgcacatctgggcagttgtaccatgcattaagagcttcctgattgagattcagtgcaccagccgtgtctattccatctacgtccacaccgtctgtgacccactctttgaagctgttgggaaaatattcagcaatgtccgcatcaacttgcagaaagaaatataaatgacatttcaaggatagaagtatacctgattttttttccttttaattttcctggtgccaatttcaagttccaagttgctaatacagcaacgaatttatgaattgaattatcttggttgaaaataaaaagatcactttctcagttttcataagtattatgtctcttctgagctatttcatctatttttggcagtctgaatttttaaaacccatttatatttctttccttacctttttatttgcatgtggatcaaccatcgctttatt

SEQ ID NO: 985 - DNA, 3360 bp, Homo sapiens
gaattccggctgtgccgcaccgaggcgagcaggagcagggaacaggtgtttaaaattatccaactgccatagagctaaattcttttttggaaaattgaaccgaacttctactgaatacaagatgaaaatgtggttgctggtcagtcatcttgtgataatatctattactacctgtttagcagagtttacatggtatagaagatatggtcatggagtttctgaggaagacaaaggatttggaccaatttttgaagagcagccaatcaataccatttatccagaggaatcactggaaggaaaagtctcactcaactgtagggcacgagccagccctttcccggtttacaaatggagaatgaataatggggacgttgatctcacaagtgatcgatacagtatggtaggaggaaaccttgttatcaacaaccctgacaaacagaaagatgctggaatatactactgtttagcatctaataactacgggatggtcagaagcactgaagcaaccctgagctttggatatcttgatcctttcccacctgaggaacgtcctgaggtcagagtaaaagaagggaaaggaatggtgcttctctgtgaccccccataccattttccagatgatcttagctatcgctggcttctaaatgaatttcctgtatttatcacaatggataaacggcgatttgtgtctcagacaaatggcaatctctacattgcaaatgttgaggcttccgacaaaggcaattattcctgctttgtttccagtccttctattacaaagagcgtgttcagcaaattcatcccactcattccaatacctgaacgaacaacaaaaccatatcctgctgatattgtagttcagttcaaggatgtatatgcattgatgggccaaaatgtgaccttagaatgttttgcacttggaaatcctgttccggatatccgatggcggaaggttctagaaccaatgccaagcactgctgagattagcacctctggggctgttcttaagatcttcaatattcagctagaagatgaaggcatctatgaatgtgaggctgagaacattagaggaaaggataaacatcaagcaagaatttatgttcaagcattccctgagtgggtagaacacatcaatgacacagaggtggacataggcagtgatctctactggccttgtgtggccacaggaaagcccatccctacaatccgatggttgaaaaatggatatgcgtatcataaaggggaattaagactgtatgatgtgacttttgaaaatgccggaatgtatcagtgcatagctgaaaacacatatggagccatttatgcaaatgctgagttgaagatcttggcgttggctccaacttttgaaatgaatcctatgaagaaaaagatcctggctgctaaaggtggaagggtgataattgaatgcaaacctaaagctgcaccgaaaccaaagttttcatggagtaaagggacagagtggcttgtcaatagcagcagaatactcatttgggaagatggtagcttggaaatcaacaacattacaaggaatgatggaggtatctatacatgctttgcagaaaataacagagggaaagctaatagcactggaacccttgttatcacagatcctacgcgaattatattggccccaattaatgccgatatcacagttggagaaaacgccaccatgcagtgtgctgcgtcctttgatcctgccttggatctcacatttgtttggtccttcaatggctatgtgatcgattttaacaaagagaatattcactaccagaggaattttatgctggattccaatggggaattactaatccgaaatgcgcagctgaaacatgctggaagatacacatgcactgcccagacaattgtggacaattcttcagcttcagctgaccttgtagtgagaggccctccaggccctccaggtggtctgagaatagaagacattagagccacttctgtggcacttacttggagccgtggttcagacaatcatagtcctatttctaaatacactatccagaccaagactattctttcagatgactggaaagatgcaaagacagatcccccaattattgaaggaaatatggaggcagcaagagcagtggacttaatcccatggatggagtatgaattccgcgtggtagcaaccaatacactgggtagaggagagcccagtataccatctaacagaattaaaacagacggtgctgcaccaaatgtggctccttcagatgtaggaggtggaggtggaagaaacagagagctgaccataacatgggcgcctttgtcaagagaataccactatggcaacaattttggttacatagtggcatttaagccatttgatggagaagaatggaaaaaagtcacagttactaatcctgatactggccgatatgtccataaagatgaaaccatgagcccttccactgcatttcaagttaaagtcaaggccttcaacaacaaaggagatggaccttacagcctactagcagtcattaattcagcacaagacgctcccagtgaagccccaacagaagtaggtgtaaaagtcttatcatcttctgagatatctgttcattgggaacatgttttagaaaaaatagtggaaagctatcagattcggtattgggctgcccatgacaaagaagaagctgcaaacagagttcaagtcaccagccaagagtactcggccaggctcgagaaccttctgccagacacccagtattttatagaagtcggggcctgcaatagtgcagggtgtggacctccaagtgacatgattgaggctttcaccaagaaagcacctcctagccagcctccaaggatcatcagttcagtaaggtctggttcacgctatataatcacctgggatcatgtcgttgcactatcaaatgaatctacagtgacgggatataaggtactctacagacctgatggccagcatgatggcaagctgtattcaactcacaaacactccatagaagtcccaatccccagagatggagaatacgttgtggaggttcgcgcgcacagtgatggaggagatggagtggtgtctcaagtcaaaatttcaggtgcacccaccctatccccaagtcttctcggcttactgctgcctgcctttggcatccttgtctacttggaattctgaatgtgttgtgacagctgctgttcccatcccagctcagaagacacccttcaaccctgggatgaccacaattccttccaatttctgcggctccatcctaagccaaataaattatactttaacaaactattcaactgatttacaacacacatgatgactgaggcattcaggaaccccttcatcca

SEQ ID NO: 986 - DNA, 4037 bp, Homo sapiens
gagctccgttgggagtcccatgtttctttatggcataatgggtgagaacacagacttggaagccaaaccacctgaatttgaaccccagttccatttaccaactgtcaaaagcttaggctttgattctaagcctgtttcctcaactgctgttctaaagattaaataggctaatattcataaggcaactgggacagtggcttgtgtgtatagcaaccattatataagtgaattatctactgagcaccacagcacttcttcactccatggtgtggtgaccagaatggagatgagacagagaactgcaggttctgcttcgagtttaagttaggatttcccttgaccaatgagacctgacttggaggagtcctggcctcattccattaccccaaacaccctctagtctctagatgaacagatcctgaatgtccaggccccacgtggcctgttctaaggcctgagatggaattggatacaggacacatccagccttgagatcttttgctaagtgtgacacagtgcccccagccctgtgctcatgttcatgcctagggaaaggcttctatcaaaagagttgaacttcttcccactggggatggaagaccatttcctcccttaaaccttggctctccctgcttccttcaggccaccaacaacacatgtgcaggatatgaaattgctgaggcatcactgctttcctacttcccttccaagtctcagctcccttattttaaaaaatatttggcctcaatgatcatttctcaacaattcctcaccgcaggagcctctgaagctcccaccaggccagctctcctcccacaacagcttcccacagcatgaagatctccgtggctgccattcccttcttcctcctcatcaccatcgccctagggaccaagactgaatcctcctcacgtgagtgcaatgccttgtcttccttccaacctagagcctgcagggaaataagcaggagtgaggttggggctcaggggaagaccaggagcagggactcagaaaggagggctggtatcttcttgaaattgtgtgtatagcaacattatataaatgaattatctactgagcaccacagcacttcaccccatggtgtggtgagcaggatggagatgagacttaggactgtaggttctgcttaagagtttaagttgggatcttccagccttgaccaatgagacttgacttgggagactccaggcttcattccactaccccaaatgccctctagtctccaaataaacagatcctgaatctccaggcctcacatggccttgatctcttatcattgccccccaggaccagtccccccttgccctcaaggacatggagtgagaccagcctgcctctctactccctcaatttctctctctttgccgctaagcaaaagagtggcccaccccatttggggtatatttcctcagggagattaggagcagtgtcttgagcccctcaagggcatttttctattggcctcctgaggtttgggcccagcctgcttccagcgtcacctgtgcccagtgagtgcagcattgcttgggtatgggctggggggaaacacgacagtgtggggtccatcctaggcccccttttctcagctgatttcttagaataagctgcctttagagataaccaaaactatttatcactcttccattttacctactctccttttcagaaactggggggaaaccgaaggttgttaaaatacagctaaagttggtgggtatgtgcacagtttgacttgccctctccgatgtcatttgtcagctcagaggaacaaggtgggagagtataggagctctgactgggtctcaggaaacaggggccccttatgccgttctttggatcgtgaggatgctgcctggaatggagctggaaaacaggatgagacccttccacccagacatctggccaccctcagtgacctctgaggccattgtgatgcacatccatgattctatgaagcagggtcacataacatgcacacacctgatttctccactccataaccacaacatgtgcctgtttgtacagggctcttggcctacaatgtccttcctgctacctctataattcaagcttggggtggctgctgtcaccttgcttctcctataaaagccatgaaacttctcaatcagaaaatagatgaaaaaatcacccaatccagtgatttttaaaactttttagaccacaaaaccttttcttcaagcaatatcttccacagaggcccaatatgtaaaacagaaaaaatgggttgagtagggtacaagacaccactctcaaatgcagcaaggcctccacaatagtccctgaggcccccagagctcagtgtaaaaaccactgatgcagtccaagggcctcatttacagaggagggaacagggggaaagtaaaatggccacagtacacaggaagcacaggcaaggttaggttaggatttgggtgccctgactctgtggcctttgtccttggggcttgctgtgggcatcctgctctctctgcaggttgtcggttcaatggggacatgggcagggtggagcactaggaggggctgggtttgcattcccaaatggcatgtctccaaatccctattgggatttcttccaaatattcctcctatttggagcacctttcccgaataaggcatgaaggctgcatgatattggccaagtccctagccttctctgccagtcggcccccagagatggtgtaagaagatctgagtgtgctgctcttcaatcctggagttgaaagtcatccaccagtctttccaagaggggttgaagaaaaggaggaagggtgattgatgatgagggaggagaaaaagaagagcccaggagtaccatggagaaggagaagagaagatgaggaaagcctactctcccctccaagttctgaggggctgtctcctccttccttccctcctccatgccctcagcttgcaggagcagccaatggtatggcctttaacaaggggcccctcctcagcatctgatgctctctcctcagggggaccttaccacccctcagagtgctgcttcacctacactacctacaagatcccgcgtcagcggattatggattactatgagaccaacagccagtgctccaagcccggaattgtgtaggtggtacacacacatcacactggggggagagggagccagcagggcctcctggagggaagcagggagtggtggtggaatggggacccccagcgtacctcccaggtgtgactacatggggagaggcagctgaggggcaatctgagcgctttctggctggagcctgcaggagccatggggaaactgaccccatggatggggagatgacagagaagggagaagaaggcaagagggcacttcctcagggggacacagagactagatgggtctaggggtcctaggaaccgaagagtatgtctcagagaggagactggctctaagctgcctctgtggaagaaaggaaaagcagtataggtcaggtggggaatttaggagggagggaagatgggctgtctcttccggccactgggcccctcggtttgtgatccttctccctcttgctccacagcttcatcaccaaaaggggccattccgtctgtaccaaccccagtgacaagtgggtccaggactatatcaaggacatgaaggagaactgagtgacccagaaggggtggcgaaggcacagctcagagacataaagagaagatgccaaggccccctcctccacccaccgctaactctcagccccagtcaccctcttggagcttccctgctttgaattaaagaccactcatgctcttccctggcctcattcctttctacgggatttactcattggccatgcactgaggacaccagggtgtggcaccctcggcatcaagcctcgctctgcagaagttttggtggagcctggtacaaaaaataggtcaggcctgcaatgcaggtagtgagaagcagaaagtgagaaagaaaagcagtgtaaagaccgtctcctcctcagcagcaacagtagcagaccccg

SEQ ID NO: 987 - DNA, 3426 bp, Homo sapiens
gtaggaatcgcagcgccaacggttgcaaggcccaagaagccatcctgggaaggaaaatgcattggggaaccctgtgcggattcttgtggctttggccctatcttttctatgtccaagctgtgcccatccaaaaagtccaagatgacaccaaaaccctcatcaagacaattgtcaccaggatcaatgacatttcacacacgcagtcagtctcctccaaacagaaagtcaccggtttggacttcattcctgggctccaccccatcctgaccttatccaagatggaccagacactggcagtctaccaacagatcctcaccagtatgccttccagaaacgtgatccaaatatccaacgacctggagaacctccgggatcttcttcacgtgctggccttctctaagagctgccacttgccctgggccagtggcctggagaccttggacagcctggggggtgtcctggaagcttcaggctactccacagaggtggtggccctgagcaggctgcaggggtctctgcaggacatgctgtggcagctggacctcagccctgggtgctgaggccttgaaggtcactcttcctgcaaggactacgttaagggaaggaactctggcttccaggtatctccaggattgaagagcattgcatggacaccccttatccaggactctgtcaatttccctgactcctctaagccactcttccaaaggcataagaccctaagcctccttttgcttgaaaccaaagatatatacacaggatcctattctcaccaggaagggggtccacccagcaaagagtgggctgcatctgggattcccaccaaggtcttcagccatcaacaagagttgtcttgtcccctcttgacccatctccccctcactgaatgcctcaatgtgaccaggggtgatttcagagagggcagaggggtaggcagagcctttggatgaccagaacaaggttccctctgagaattccaaggagttccatgaagaccacatccacacacgcaggaactcccagcaacacaagctggaagcacatgtttatttattctgcattttattctggatggatttgaagcaaagcaccagcttctccaggctctttggggtcagccagggccaggggtctccctggagtgcagtttccaatcccatagatgggtctggctgagctgaacccattttgagtgactcgagggttgggttcatctgagcaagagctggcaaaggtggctctccagttagttctctcgtaactggtttcatttctactgtgactgatgttacatcacagtgtttgcaatggtgttgccctgagtggatctccaaggaccaggttattttaaaaagatttgttttgtcaagtgtcatatgtaggtgtctgcacccaggggtggggaatgtttgggcagaagggagaaggatctagaatgtgttttctgaataacatttgtgtggtgggttctttggaaggagtgagatcattttcttatcttctgcaattgcttaggatgtttttcatgaaaatagctctttcaggggggttgtgaggcctggccaggcaccccctggagagaagtttctggccctggctgaccccaaagagcctggagaagctgatgctttgcttcaaatccatccagaataaaacgcaaagggctgaaagccatttgttggggcagtggtaagctctggctttctccgactgctagggagtggtctttcctatcatggagtgacggtcccacactggtgactgcgatcttcagagcaggggtccttggtgtgaccctctgaatgggtccagggttgatcacactctgggtttattacatggcagtgttcctatttggggcttgcatgccaaattgtagttcttgtctgattggctcacccaagcaaggccaaaattaccaaaaatcttggggggtttttactccagtggtgaagaaaactcctttagcaggtggtcctgagacctgacaagcactgctaggcgagtgccaggactccccaggccaggccaccaggatgcccttcccactggaggtcacattcaggaagatgaaagaggaggtttggggtctgccaccatcctgctgctgtgtttttgctatcacacagtgggtggtggatctgtccaaggaaacttgaatcaaagcagttaactttaagactgagcacctgcttcatgctcagccctgactggtgctataggctggagaagctcacccaataaacattaagattgaggcctgccctcagggatcttgcgttcccagtggtcaaaccgcactcacccatgtgccaaggtggggtatttaccacagcagctgaacagccaaatgcatggtgcagttgacagcaggtgggaaatggtatgagctgaggggggccgtgcccaggggcccacagggaaccctgcttgcactttgtaacatgtttacttttcagggcatcttagcttctattatagccacatccctttgaaacaagataactgagaatttaaaaataagaaaatacataagaccataacagccaacaggtggcaggaccaggactatagcccaggtcctctgatacccagagcattacgtgagccaggtaatgagggactggaaccagggagaccgagcgctttctggaaaagaggagtttcgaggtagagtttgaaggaggtgagggatgtgaattgcctgcagagagaagcctgttttgttggaaggtttggtgtgtggagatgcagaggtaaaagtgtgagcagtgagttacagcgagaggcagagaaagaagagacaggagggcaagggccatgctgaagggaccttgaagggtaaagaagtttgatattaaaggagttaagagtagcaagttctagagaagaggctggtgctgtggccagggtgagagctgctctggaaaatgtgacccagatcctcacaaccacctaatcaggctgaggtgtcttaagccttttgctcacaaaacctggcacaatggctaattcccagagtgtgaaacttcctaagtataaatggttgtctgtttttgtaacttaaaaaaaaaaaaaaaagtttggccgggtgcggtggctcacgcctgtaatcccagcactttgggaggccaaggtggggggatcacaaggtcactagatggcgagcatcctggccaacatggtgaaaccccgtctctactaaaaacacaaaagttagctgagcgtggtggcgggcgcctgtagtcccagccactcgggaggctgagacaggagaatcgcttaaacctgggaggcggagagtacagtgagccaagatcgcgccactgcactccggcctgatgacagagcgagattccgtcttaaaaaaaaaaaaaaaaaaagtttgtttttaaaaaaatctaaataaaataactttgccccctg

SEQ ID NO: 988 - DNA, 3388 bp, Homo sapiens
aattcggagaacctgctacaggaacagctgcaggcagagacagagctgtatgcagaggctgaggagatgcgggtgcggctggcggccaagaagcaggagctggaggagatactgcatgagatggaggcccgcctggaggaggaggaagacaggggccagcagctacaggctgaaaggaagaagatggcccagcagatgctggaccttgaagaacagctggaggaggaggaagctgccaggcagaagctgcaacttgagaaggtcacggctgaggccaagatcaagaaactggaggatgagatcctggtcatggatgatcagaacaataaactatcaaaagaacgaaaactccttgaggagaggattagtgacttaacgacaaatcttgcagaagaggaagaaaaggccaagaatcttaccaagctgaaaaacaagcatgaatctatgatttcagaactggaagtgcggctaaagaaggaagagaagagccgacaggagctggagaagctgaaacggaagctggagggtgatgccagcgacttccacgagcagatcgctgacctccaggcgcagatcgcagagctcaagatgcagctggccaagaaggaggaggagctgcaggcggccctggccaggcttgacgatgaaatcgctcagaagaacaatgccctgaagaagatccgggagctggagggccacatctcagacctccaggaggacctggactcagagcgggccgccaggaacaaggctgaaaagcagaagcgagacctcggcgaggagctggaggccctaaagacagagctggaagacacactggacagcacagccactcagcaggagctcagggccaagagggagcaggaggtgacggtgctgaagaaggccctggatgaagagacgcggtcccatgaggctcaggtccaggagatgaggcagaaacacgcacaggcggtggaggagctcacagagcagcttgagcagttcaagagggccaaggcgaacctagacaagaataagcagacgctggagaaagagaacgcagacctggccggggagctgcgggtcctgggccaggccaagcaggaggtggaacataagaagaagaagctggaggcgcaggtgcaggagctgcagtccaagtgcagcgatggggagcgggcccgggcggagctcaatgacaaagtccacaagctgcagaatgaagttgagagcgtcacagggatgcttaacgaggccgaggggaaggccattaagctggccaaggacgtggcgtccctcagttcccagctccaggacacccaggagttgcttcaagaagaaacccggcagaagctcaacgtgtctacgaagctgcgccagctggaggaggagcggaacagcctgcaagaccagctggacgaggagatggaggccaagcagaacctggagcgccacatctccactctcaacatccagctctccgactcgaagaagaagctgcaggactttgccagcaccgtggaagctctggaagaggggaagaagaggttccagaaggagatcgagaacctcacccagcagtacgaggagaaggcggccgcttatgataaactggaaaagaccaagaacaggcttcagcaggagctggacgacctggttgttgatttggacaaccagcggcaactcgtgtccaacctggaaaagaagcagaggaaatttgatcagttgttagccgaggagaaaaacatctcttccaaatacgcggatgagagggacagagctgaggcagaagccagggagaaggaaaccaaggccctgtccctggctcgggcccttgaagaggccttggaagccaaagaggaactcgagcggaccaacaaaatgctcaaagccgaaatggaagacctggtcagctccaaggatgacgtgggcaagaacgtccatgagctggagaagtccaagcgggccctggagacccagatggaggagatgaagacgcagctggaagagctggaggacgagctgcaagcctcggaggacgccaaactgcggctggaagtcaacatgcaggcgctcaagggccagttcgaaagggatctccaagcccgggacgagcagaatgaggagaagaggaggcaactgcagagacagcttcacgagtatgagacggaactggaagacgagcgaaacgaacgtgccctggcagctgcagcaaagaagaagctggaaggggacctgaaagacctggagcttcaggccgactctgccatcaaggggagggaggaagccatcaagcagctacgcaaactgcaggctcagatgaaggactttcaaagagagctggaagatgcccgtgcctccagagatgagatctttgccacagccaaagagaatgagaagaaagccaagagcttggaagcagacctcatgcagctacaagaggacctcgccgccgctgagagggctcgcaaacaagcggacctcgagaaggaggaactggcagaggagctggccagtagcctgtcgggaaggaacgcactccaggacgagaagcgccgcctggaggcccggatcgcccagctggaggaggagctggaggaggagcagggcaacatggaggccatgagcgaccgggtccgcaaagccacacagcaggccgagcagctcagcaacgagctggccacagagcgcagcacggcccagaagaatgagagtgcccggcagcagctcgagcggcagaacaaggagctccggagcaagctccacgagatggagggggccgtcaagtccaagttcaagtccaccatcgcggcgctggaggccaagattgcacagctggaggagcaggtcgagcaggaggccagagagaaacaggcagccaccaagtcgctgaagcagaaagacaagaagctgaaggaaatcttgctgcaggtggaggacgagcgcaagatggccgagcagtacaaggagcaggcagagaaaggcaatgccagggtcaagcagctcaagaggcagctggaggaggcagaggaggagtcccagcgcatcaacgccaaccgcaggaagctgcagcgggagctggatgaggccacggagagcaacgaggccatgggccgtgaggtgaacgcactcaagagcaagctcagagggccccccccacaggaaacttcgcagtgatgcaccaggcgaggaaacgagacctctttcgttccttctagaaggtctggaggacgtagagttattgaaaatgcagatggttctgaggaggaactggacactcgagacgcagacttcaatggaaccaaggccagtgaataagcaactttctacagttttgcaccacggcaagaaaaccaaaaaccaaaacaaacaaacaaaaaaaacccaacaacaacccgaacaagac

SEQ ID NO: 989 - DNA, 854 bp, Homo sapiens
tgggaggaggtggattccagcccccagccccagggctctgaatcgctgccagctcagccccctgcccagcctgccccacagcctgagccccagcaggccagagagcccagtcctgaggtgagctgctgtggcctgtggccaggcgaccccagcgctcccagaactgaggctggcagccagccccagcctcagccccaactgcgaggcagagagacaccaatgggaatcccaatggggaagtcgatgctggtgcttctcaccttcttggccttcgcctcgtgctgcattgctgcttaccgccccagtgagaccctgtgcggcggggagctggtggacaccctccagttcgtctgtggggaccgcggcttctacttcagcgacttccagaggcccgcaagccgtgtgagccgtcgcagccgtggcatcgttgaggagtgctgtttccgcagctgtgacctggccctcctggagacgtactgtgctacccccgccaagtccgagagggacgtgtcgacccctccgaccgtgcttccggacaacttccccagataccccgtgggcaagttcttccaatatgacacctggaagcagtccacccagcgcctgcgcaggggcctgcctgccctcctgcgtgcccgccggggtcacgtgctcgccaaggagctcgaggcgttcagggaggccaaacgtcaccgtcccctgattgctctacccacccaagaccccgcccacgggggcgcccccccagagatggccagcaatcggaagtgagcaaaactgccgcaagtctgcagcccggcgccaccatcctgcagcctcctcctgaccacggacgtttccatcaggttccatcc

SEQ ID NO: 990 - DNA, 1025 bp, Homo sapiens
gtcccgagcgcgagcggagacgatgcagcggagactggttcagcagtggagcgtcgcggtgttcctgctgagctacgcggtgccctcctgcgggcgctcggtggagggtctcagccgccgcctcaaaagagctgtgtctgaacatcagctcctccatgacaaggggaagtccatccaagatttacggcgacgattcttccttcaccatctgatcgcagaaatccacacagctgaaatcagagctacctcggaggtgtcccctaactccaagccctctcccaacacaaagaaccaccccgtccgatttgggtctgatgatgagggcagatacctaactcaggaaactaacaaggtggagacgtacaaagagcagccgctcaagacacctgggaagaaaaagaaaggcaagcccgggaaacgcaaggagcaggaaaagaaaaaacggcgaactcgctctgcctggttagactctggagtgactgggagtgggctagaaggggaccacctgtctgacacctccacaacgtcgctggagctcgattcacggaggcattgaaattttcagcagagaccttccaaggacatattgcaggattctgtaatagtgaacatatggaaagtattagaaatatttattgtctgtaaatactgtaaatgcattggaataaaactgtctcccccattgctctatgaaactgcacattggtcattgtgaatatttttttttttgccaaggctaatccaattattattatcacatttaccataatttattttgtccattgatgtatttattttgtaaatgtatcttggtgctgctgaatttctatattttttgtaacataatgcactttagatatacatatcaagtatgttgataaatgacacaatgaagtgtctctattttgtggttgattttaatgaatgcctaaatataattatccaaattgattttccttcgtgcatgtaaaaataacagtattttaaatttgtaaagaatgtctaataaaatataatctaattac

SEQ ID NO: 991 - DNA, 655 bp, Homo sapiens
ccaatggccattagccttcacccatccgcacgacctcatttacatcccctattcttatcatcttccagaccacctcgagagccaggggttcagagcccctctttcctaatgagggctcccaggacaggatgaggtgcctgcctgaggtcacacggcagggagtgcagctccccctgccccgacctgctgagccccatcacttccgcagatcctggcattctctcagaagctgtactacgacaaggaacagacagtgagcatgaaggacaatgtcaggcccctgcagcagctggggcagcgcacggtgataaagtccggggccccgggtcggccgctgccctgggccctgcctgccctgctgggccccatgctggcctgcctgctggccggcttcctgcgatgatggctcacttctgcacgcagcctctctgttgcctcagctctccaagttccaggcttccggtccttagccttcccaggtgggactttaggcatgattaaaatatggacatatttttggagaaacctttctcaagtgtgtttttagccttccacaactaccccaccctgtccccctccacccacccctgttcctcctgttccagggcgggggctttaaggccaggagatttctccaagcaggtaccaccaggtg

SEQ ID NO: 992 - DNA, 2130 bp, Homo sapiens
gcgcccaggtagctgcgaggaaacttttgcagcggctgggtagcagcacgtctcttgctcctcagggccactgccaggcttgccgagtcctgggactgctctcgctccggctgccactctcccgcgctctcctagctccctgcgaagcaggatggccgggaccgtgcgcaccgcgtgcttggtggtggcgatgctgctcagcttggacttcccgggacaggcgcagcccccgccgccgccgccggacgccacctgtcaccaagtccgctccttcttccagagactgcagcccggactcaagtgggtgccagaaactcccgtgccaggatcagatttgcaagtatgtctccctaagggcccaacatgctgctcaagaaagatggaagaaaaataccaactaacagcacgattgaacatggaacagctgcttcagtctgcaagtatggagctcaagttcttaattattcagaatgctgcggttttccaagaggcctttgaaattgttgttcgccatgccaagaactacaccaatgccatgttcaagaacaactacccaagcctgactccacaagcttttgagtttgtgggtgaatttttcacagatgtgtctctctacatcttgggttctgacatcaatgtagatgacatggtcaatgaattgtttgacagcctgtttccagtcatctatacccagctaatgaacccaggcctgcctgattcagccttggacatcaatgagtgcctccgaggagcaagacgtgacctgaaagtatttgggaatttccccaagcttattatgacccaggtttccaagtcactgcaagtcactaggatcttccttcaggctctgaatcttggaattgaagtgatcaacacaactgatcacctgaagttcagtaaggactgtggccgaatgctcaccagaatgtggtactgctcttactgccagggactgatgatggttaaaccctgtggcggttactgcaatgtggtcatgcaaggctgtatggcaggtgtggtggagattgacaagtactggagagaatacattctgtcccttgaagaacttgtgaatggcatgtacagaatctatgacatggagaacgtactgcttggtctcttttcaacaatccatgattctatccagtatgtccagaagaatgcaggaaagctgaccaccactattggcaagttatgtgcccattctcaacaacgccaatatagatctgcttattatcctgaagatctctttattgacaagaaagtattaaaagttgctcatgtagaacatgaagaaaccttatccagccgaagaagggaactaattcagaagttgaagtctttcatcagcttctatagtgctttgcctggctacatctgcagccatagccctgtggcggaaaacgacaccctttgctggaatggacaagaactcgtggagagatacagccaaaaggcagcaaggaatggaatgaaaaaccagttcaatctccatgagctgaaaatgaagggccctgagccagtggtcagtcaaattattgacaaactgaagcacattaaccagctcctgagaaccatgtctatgcccaaaggtagagttctggataaaaacctggatgaggaagggtttgaaagtggagactgcggtgatgatgaagatgagtgcattggaggctctggtgatggaatgataaaagtgaagaatcagctccgcttccttgcagaactggcctatgatctggatgtggatgatgcgcctggaaacagtcagcaggcaactccgaaggacaacgagataagcacctttcacaacctcgggaacgttcattccccgctgaagcttctcaccagcatggccatctcggtggtgtgcttcttcttcctggtgcactgactgcctggtgcccagcacatgtgctgccctacagcaccctgtggtcttcctcgataaagggaaccactttcttatttttttctatttttttttttttgttatcctgtatacctcctccagccatgaagtagaggactaaccatgtgttatgttttcgaaaatcaaatggtatcttttggaggaagatacattttagtggtagcatatagattgtccttttgcaaaaaaaaaaaccg

SEQ ID NO: 993 - DNA, 2943 bp, Homo sapiens
gggaagcatggggcttcccaggctggtctgcgccttcttgctcgccgcctgctgctgctgtcctcgcgtcgcgggtgtgcccggagaggctgagcagcctgcgcctgagctggtggaggtggaagtgggcagcacagcccttctgaagtgcggcctctcccagtcccaaggcaacctcagccatgtcgactggttttctgtccacaaggagaagcggacgctcatcttccgtgtgcgccagggccagggccagagcgaacctggggagtacgagcagcggctcagcctccaggacagaggggctactctggccctgactcaagtcaccccccaagacgagcgcatcttcttgtgccagggcaagcgccctcggtcccaggagtaccgcatccagctccgcgtctacaaagctccggaggagccaaacatccaggtcaaccccctgggcatccctgtgaacagtaaggagcctgaggaggtcgctacctgtgtagggaggaacgggtaccccattcctcaagtcatctggtacaagaatggccggcctctgaaggaggagaagaaccgggtccacattcagtcgtcccagactgtggagtcgagtggtttgtacaccttgcagagtattctgaaggcacagctggttaaagaagacaaagatgcccagttttactgtgagctcaactaccggctgcccagtgggaaccacatgaaggagtccagggaagtcaccgtccctgttttctacccgacagaaaaagtgtggctggaagtggagcccgtgggaatgctgaaggaaggggaccgcgtggaaatcaggtgtttggctgatggcaaccctccaccacacttcagcatcagcaagcagaaccccagcaccagggaggcagaggaagagacaaccaacgacaacggggtcctggtgctggagcctgcccggaaggaacacagtgggcgctatgaatgtcaggcctggaacttggacaccatgatatcgctgctgagtgaaccacaggaactactggtgaactatgtgtctgacgtccgagtgagtcccgcagcccctgagagacaggaaggcagcagcctcaccctgacctgtgaggcagagagtagccaggacctcgagttccagtggctgagagaagagacagaccaggtgctggaaagggggcctgtgcttcagttgcatgacctgaaacgggaggcaggaggcggctatcgctgcgtggcgtctgtgcccagcatacccggcctgaaccgcacacagctggtcaagctggccatttttggccccccttggatggcattcaaggagaggaaggtgtgggtgaaagagaatatggtgttgaatctgtcttgtgaagcgtcagggcacccccggcccaccatctcctggaacgtcaacggcacggcaagtgaacaagaccaagatccacagcgagtcctgagcaccctgaatgtcctcgtgaccccggagctgttggagacaggtgttgaatgcacggcctccaacgacctgggcaaaaacaccagcatcctcttcctggagctggtcaatttaaccaccctcacaccagactccaacacaaccactggcctcagcacttccactgccagtcctcataccagagccaacagcacctccacagagagaaagctgccggagccggagagccggggcgtggtcatcgtggctgtgattgtgtgcatcctggtcctggcggtgctgggcgctgtcctctatttcctctataagaagggcaagctgccgtgcaggcgctcagggaagcaggagatcacgctgcccccgtctcgtaagaccgaacttgtagttgaagttaagtcagataagctcccagaagagatgggcctcctgcagggcagcagcggtgacaagagggctccgggagaccagggagagaaatacatcgatctgaggcattagccccgaatcacttcagctcccttccctgcctggaccattcccagctccctgctcactcttctctcagccaaagctcaaagggactagagagaagcctcctgctcccctcgcctgcacaccccctttcagagggccactgggttaggacctgaggacctcacttggccctgcaaggcccgcttttcagggaccagtccaccaccatctcctccacgttgagtgaagctcatcccaagcaaggagccccagtctcccgagcgggtaggagagtttcttgcagaacgtgttttttctttacacacattatgctgtaaatacgctcgtcctgccagcagctgagctgggtagcctctctgagctggtttcctgccccaaaggctggcattccaccatccaggtgcaccactgaagtgaggacacaccggagccaggcgcctgctcatgttgaagtgcgctgttcacacccgctccggagagcaccccagcagcatccagaagcagctgcagtgcaagcttgcatgcctgcgtgttgctgcaccaccctcctgtctgcctcttcaaagtctcctgtgacattttttctttggtcagaggccaggaactgtgtcattccttaaagatacgtgccggggccaggtgtggctcacgcctgtaatcccagcactttgggaggccgaggcggcggatcacaaagtcagacgagaccatcctggctaacacggtgaaaccctgtctctactaaaaatacaaaaaaaaattagctaggcgtagtggttggcacctatagtcccagctactcggaaggctgaagcaggagaatggtatgaatccaggaggtggagcttgcagtgagccgagaccgtgccactgcactccagcctgggcaacacagcgagactccgtctcgagccggccggttgcgcgggccctcggaccctcagagaggcgagggttcgagggcacgagttcgaggccaacctggtccacatgggttg

SEQ ID NO: 994 - DNA, 1340 bp, Homo sapiens
gcacccggcagcggtctcaggccaagccccctgccagcatggccagcgagttcaagaagaagctcttctggagggcagtggtggccgagttcctggccacgaccctctttgtcttcatcagcatcggttctgccctgggcttcaaatacccggtggggaacaaccagacggcggtccaggacaacgtgaaggtgtcgctggccttcgggctgagcatcgccacgctggcgcagagtgtgggccacatcagcggcgcccacctcaacccggctgtcacactggggctgctgctcagctgccagatcagcatcttccgtgccctcatgtacatcatcgcccagtgcgtgggggccatcgtcgccaccgccatcctctcaggcatcacctcctccctgactgggaactcgcttggccgcaatgacctggctgatggtgtgaactcgggccagggcctgggcatcgagatcatcgggaccctccagctggtgctatgcgtgctggctactaccgaccggaggcgccgtgaccttggtggctcagccccccttgccatcggcctctctgtagcccttggacacctcctggctattgactacactggctgtgggattaaccctgctcggtcctttggctccgcggtgatcacacacaacttcagcaaccactggattttctgggtggggccattcatcgggggagccctggctgtactcatctacgacttcatcctggccccacgcagcagtgacctcacagaccgcgtgaaggtgtggaccagcggccaggtggaggagtatgacctggatgccgacgacatcaactccagggtggagatgaagcccaaatagaaggggtctggcccgggcatccacgtagggggcaggggcaggggcgggcggagggaggggaggggtgaaatccatactgtagacactctgacaagctggccaaagtcacttccccaagatctgccagacctgcatggtcaagcctcttatgggggtgtttctatctctttctttctctttctgtttcctggcctcagagcttcctggggaccaagatttaccaattcacccactcccttgaagttgtggaggaggtgaaagaaagggacccacctgctagtcgcccctcagagcatgatgggaggtgtgccagaaagtcccccctcgccccaaagttgctcaccgactcacctgcgcaagtgcctgggattctaccgtaattgctttgtgcctttgggcacggccctccttcttttcctaacatgcaccttgctcccaatggtgcttggagggggaagagatcccaggaggtgcagtggagggggcaagctt

SEQ ID NO: 995 - DNA, 2625 bp, Homo sapiens
ggcagccgtccggggccgccactctcctcggccggtccctggctcccggaggcggccgcgcgtggatgcggcgggagctggaagcctcaagcagccggcgccgtctctgccccggggcgccctatggcttgaagagcctggccacccagtggctccaccgccctgatggatccactgaatctgtcctggtatgatgatgatctggagaggcagaactggagccggcccttcaacgggtcagacgggaaggcggacagaccccactacaactactatgccacactgctcaccctgctcatcgctgtcatcgtcttcggcaacgtgctggtgtgcatggctgtgtcccgcgagaaggcgctgcagaccaccaccaactacctgatcgtcagcctcgcagtggccgacctcctcgtcgccacactggtcatgccctgggttgtctacctggaggtggtaggtgagtggaaattcagcaggattcactgtgacatcttcgtcactctggacgtcatgatgtgcacggcgagcatcctgaacttgtgtgccatcagcatcgacaggtacacagctgtggccatgcccatgctgtacaatacgcgctacagctccaagcgccgggtcaccgtcatgatctccatcgtctgggtcctgtccttcaccatctcctgcccactcctcttcggactcaataacgcagaccagaacgagtgcatcattgccaacccggccttcgtggtctactcctccatcgtctccttctacgtgcccttcattgtcaccctgctggtctacatcaagatctacattgtcctccgcagacgccgcaagcgagtcaacaccaaacgcagcagccgagctttcagggcccacctgagggctccactaaagggcaactgtactcaccccgaggacatgaaactctgcaccgttatcatgaagtctaatgggagtttcccagtgaacaggcggagagtggaggctgcccggcgagcccaggagctggagatggagatgctctccagcaccagcccacccgagaggacccggtacagccccatcccacccagccaccaccagctgactctccccgacccgtcccaccacggtctccacagcactcctgacagccccgccaaaccagagaagaatgggcatgccaaagaccaccccaagattgccaagatctttgagatccagaccatgcccaatggcaaaacccggacctccctcaagaccatgagccgtagaaagctctcccagcagaaggagaagaaagccactcagatgctcgccattgttctcggcgtgttcatcatctgctggctgcccttcttcatcacacacatcctgaacatacactgtgactgcaacatcccgcctgtcctgtacagcgccttcacgtggctgggctatgtcaacagcgccgtgaaccccatcatctacaccaccttcaacattgagttccgcaaggccttcctgaagatccttcactgctgactctgctgcctgcccgcacagcagcctgcttcccacctcctgcccaggccagccagcctcacccttgcgaaccgtgagcaggaaggcctgggtggatcggcctcctcttcaccccggcagccctgcagtgttcgcttggctccatgctcctcactgcccgcacaccctcactctgccagggcagtgctagtgagctgggcatggtaccagccctggggtgcccccagctcaggggcagctcatagagtcccccctcccacctccagtccccctatccttggcaccaaagatgcagccgccttccttgaccttcctctggggctctagggttgctggagcctgagtcagggcccagaggctgagttttctctttgtggggcttggcgtggagcaggcggtggggagagatggacagttcacaccctgcaaggcccacaggaggcaagcaagctctcttgccgaggagccaggcaacttcagtcctgggagaccatgtaaataccagactgcaggttggacccagagattcccaagccaaaaccttagctccctccgcacccgatgtgacctctactttccagctagtccgacccacctcaccccgttacagctccccaagtggtttccacatgctctgagaagaggagccctcatcttgaagggcccaggagggtctatggggagaggaactccttgcctagcccaccctgctgccttctgacggccctgcaatgtatcccttctcacagcacatgctgccagcctggggcctggcagggaggtcaggccctggaactctatctgggcctgggctaggggacatcagaggttctttgagggactgcctctgccacactctgacgcaaaaccactttccttttctattccttctggcctttcctctctcctgtttcccttcccttccactgcctctgccttagaggagcccacggctaagaggctgctgaaaaccatctgcctggcctggccctgccctgaggaaggaggggaagctgcagcttgggagagcccctggggctagactctgtaacatcactatccatgcaccaaactaataaaactttgacgagtcaccttccaggacccctgggtaaaaaaaaaaaaaaa

SEQ ID NO: 996 - DNA, 3128 bp, Homo sapiens
ccttgtgcatttggtctgaagacaaagatgactgcaggagtgggcaggccggagtgggggtgacctggcctgtgccaggaaggaggaggagtctgcagccctgtgcggttcaacatccatcaaggagtccagagcaggagccaggccaggcgggagggaaaggccctgggaggggctctctaatctcccagccccgactctgccccgtcactgccgctgctcctcattactcgctggggctgctgtcgcctccccgaagggtggccttgtccagatagtggcaaacctccctgccgtggatgagtcaggagcattttcttaagaggaacatcactggaaaacaaaatgagcggggacacagaaaccaacagcagtggctgcatttgtggtacaggctcctcttccagagctcgctgatgcccacctcagacaggcctgaccacggcacggctggtgggatttgccagtcacctcaaccagccagttccaccctcagcttctctcagaagggagcaccacactcctcaagctcagtgaatgtatcccggcatgggtggggccagagcctgtgatatctcgaggtgggctcggcaggacaccggggtgtggaagggggaagcgagcacctgactcagacagcgcgggagctcgcaggagtcacgaggccacagcgacttcattgtctgactgggcctggacctataaacttcccacctcagccttgggccaagcctggaagataaaaatggagcaccccatggcgcccctcactcagattctcccctgggcttctcccacgcagccccagaagaggacacaccagccccagagttagccccagaggcccctgagcctcctgaagagccccgcctaggagtgctgaccgtgaccgacacaaccccagactccatgcgcctctcgtggagcgtggcccagggcccctttgattccttcgtggtccagtatgaggacacgaacgggcagccccaggccttgctcgtggacggcgaccagagcaagatcctcatctcaggcctggagcccagcaccccctacaggttcctcctctatggcctccatgaagggaagcgcctggggcccctctcagctgagggcaccacagggctggctcctgctggtcagacctcagaggagtcaaggccccgcctgtcccagctgtctgtgactgacgtgaccaccagttcactgaggctcaactgggaggccccaccgggggccttcgactccttcctgctccgctttggggttccatcaccaagcactctggagccgcatccgcgtccactgctgcagcgcgagctgatggtgccggggacgcggcactcggccgtgctccgggacctgcgttccgggactctgtacagcctgacactgtatgggctgcgaggaccccacaaggccgacagcatccagggaaccgcccgcaccctcagcccagttctggagagcccccgtgacctccaattcagtgaaatcagggagacctcagccaaggtcaactggatgcccccaccatcccgggcggacagcttcaaagtctcctaccagctggcggacggaggggagcctcagagtgtgcaggtggatggccaggcccggacccagaaactccaggggctgatcccaggcgctcgctatgaggtgaccgtggtctcggtccgaggctttgaggagagtgagcctctcacaggcttcctcaccacggttcctgacggtcccacacagttgcgtgcactgaacttgaccgagggattcgccgtgctgcactggaagcccccccagaatcctgtggacacctatgacgtccaggtcacagcccctggggccccgcctctgcaggcggagaccccaggcagcgcggtggactaccccctgcatgaccttgtcctccacaccaactacaccgccacagtgcgtggcctgcggggccccaacctcacttccccagccagcatcaccttcaccacagggctagaggcccctcgggacttggaggccaaggaagtgaccccccgcaccgccctgctcacttggactgagcccccagtccggcccgcaggctacctgctcagcttccacacccctggtggacagaaccaggagatcctgctcccaggagggatcacatctcaccagctccttggcctctttgggtccacctcctacaatgcacggctccaggccatgtggggccagagcctcctgccgcccgtgtccacctctttcaccacgggtgggctgcggatccccttccccagggactgcggggaggagatgcagaacggagccggtgcctccaggaccagcaccatcttcctcaacggcaaccgcgagcggcccctgaacgtgttttgcgacatggagactgatgggggcggctggctggtgttccagcgccgcatggatggacagacagacttctggagggactgggaggactatgcccatggttttgggaacatctctggagagttctggctgggcaatgaggccctgcacagcctgacacaggcaggtgactactccatccgcgtggacctgcgggctggggacgaggctgtgttcgcccagtacgactccttccacgtagactcggctgcggagtactaccgcctccacttggagggctaccacggcaccgcaggggactccatgagctaccacagcggcagtgtcttctctgcccgtgatcgggaccccaacagcttgctcatctcctgcgctgtctcctaccgaggggcctggtggtacaggaactgccactacgccaacctcaacgggctctacgggagcacagtggaccatcagggagtgagctggtaccactggaagggcttcgagttctcggtgcccttcacggaaatgaagctgagaccaagaaactttcgctccccagcggggggaggctgagctgctgcccacctctctcgcaccccagtatgactgccgagcactgaggggtcgccccgagagaagagccagggtccttcaccacccagccgctggaggaagccttctctgccagcgatctcgcagcactgtgtttacaggggggaggggaggggttcgtacaggagcaataaaggagaaactgaggtacccgaaaa

SEQ ID NO: 997 - DNA, 1158 bp, Homo sapiens
cagcggactccgagaccagcggatctcggcaaaccctctttctcgaccacccacctaccattcttggaaccatggcggcagtggcggcggcctcggctgaactgctcatcatcggctggtacatcttccgcgtgctgctgcaggtgttcaggtactccctgcagaagctggcatacacggtgtcgcggaccgggcggcaggtgttgggggagcgcaggcagcgagcccccaactgaggccccagctcccagcctgggcggccgtatatagtgctcctgtgcatctcggccagcacgggagccagtgccgcgcaggaatgtggggtcccctgtgttccctcgccagaggagcacttggcaaggtcagtgaggggccagtagacccccggagaagcagtaccgacaatgacgaagataccagatcccttcccaacccctttgcaccggtcccactaaggggcagggtcgagagaggaggggggatagggggagcagaccctgagatctgggcataggcaccgcattctgatctggacaaagtcgggacagcaccatcccagccccgaagccagggccatgccagcaggccccaccatggaaatcaaaacaccgcaccagccagcagaatggacattctgacatcgccagccgacgccctgaatcttggtgcagcacccaccgcgtgcctgtgtggcgggactggagggcacagttgaggaaggagggtggttaagaaatacagtggggccctctcgctgtcccttgcccagggcacttgtattccagcctcgctgcatttgctctctcgattgcccctttcctcctacatgcctcccaagcccaccctactccaaaagtaatgtgtcacttgatttggaactattcaagcagtaaaagtaaatgaatcccacctttactaaaacactttctctgaaccccccttgcccctcactgatcttgcttttccctggtctcatgcagttgtggtcaatattgtggtaatcgctaattgtactgattgtttaagtgtgcattagttgtctctccccagctagattgtaagctcctggaggacagggaccacctctacaaaaaataaaaaaagtacctcccctgtctcgcacagtgtcccaggaccctgcggtgcagtagaggcgca

SEQ ID NO: 998 - DNA, 975 bp, Homo sapiens
cacttcggaggattgctcaacaaccatgctgggcatctggaccctcctacctctggttcttacgtctgttgctagattatcgtccaaaagtgttaatgcccaagtgactgacatcaactccaagggattggaattgaggaagactgttactacagttgagactcagaacttggaaggcctgcatcatgatggccaattctgccataagccctgtcctccaggtgaaaggaaagctagggactgcacagtcaatggggatgaaccagactgcgtgccctgccaagaagggaaggagtacacagacaaagcccatttttcttccaaatgcagaagatgtagattgtgtgatgaaggacatgatgtgaacatggaatcatcaaggaatgcacactcaccagcaacaccaagtgcaaagaggaaggatccagatctaacttggggtggctttgtcttcttcttttgccaattccactaattgtttggggaaacagtggcaataaatttatctgatgttgacttgagtaaatatatcaccactattgctggagtcatgacactaagtcaagttaaaggctttgttcgaaagaatggtgtcaatgaagccaaaatagatgagatcaagaatgacaatgtccaagacacagcagaacagaaagttcaactgcttcgtaattggcatcaacttcatggaaagaaagaagcgtatgacacattgattaaagatctcaaaaaagccaatctttgtactcttgcagagaaaattcagactatcatcctcaaggacattactagtgactcagaaaattcaaacttcagaaatgaaatccaaagcttggtctagagtgaaaaacaacaaattcagttctgagtatatgcaattagtgtttgaaaagattcttaatagctggctgtaaatactgcttggttttttactgggtacattttatcatttattagcgctgaagagccaacata

SEQ ID NO: 999 - DNA, 1443 bp, Homo sapiens
cctactccacgaactgatgcgcccaccccaggcagtaactctactcccggattgaggcctgtacctggaaaaccaccaggagttgaccctttggcctcaagcctaaggaccccaatggcagtaccttgtccatatccaactccatttgggattgtgccccatgctggaatgaacggagagctgaccagccccggagcggcctacgctgggctccacaacatctcccctcagatgagcgcagctgctgccgccgccgctgctgctgctgcctatgggagatcaccagtggtgggatttgatccacaccatcacatgcgtgtgccagcaatacctccaaacctgacaggcattccaggaggaaaaccagcatactccttccatgttagcgcagatggtcagatgcagcctgtcccttttccacccgaccccctcatcggacctggaatcccccggcatgctcgccagatcaacaccctcaaccacggggaggtggtgtgcgcggtgaccatcagcaaccccacgagacacgtgtacacgggtgggaagggcgcggtcaaggtctgggacatcagccacccaggcaataagagtcctgtctcccagctcgactgtctgaacagggataactacatccgttcctgcagattgctccctgatggtcgcaccctaattgttggaggggaagccagtactttgtccatttgggacctggcggctccaaccccacgcatcaaggcagagctgacatcctcggcccccgcctgctatgccctggccatcagccccgattccaaggtctgcttctcatgctgcagcgacggcaacatcgctgtgtgggatctgcacaaccagaccttggtgaggcaattccagggccacacagatggagccagctgtattgacatttctaatgatggcaccaagctctggacaggtggtttggacaacacggtcaggtcctgggacctgcgggaggggcggcagctgcagcagcacgacttcacctcccagatcttttctctgggctactgcccaactggagagtggcttgcagtggggatggagaacagcaatgtggaagttttgcatgtcaccaagccagacaaataccaactacatcttcatgagagctgtgtgctgtcgctcaagtttgcccattgtggcaaatggtttgtaagcactggaaaggacaaccttctgaatgcctggagaacgccttacggggccagtatattccagtccaaagaatcctcatcggtgcttagctgtgacatctccgtggacgacaaatacattgtcactggctctggggataagaaggccacagtttatgaagttatttattaaagacaaatcttcatgcagactggacttctcctcctggtagcactttgctctgtcatcctttttgttcacccccatccccgcatctaaaaccaagga

SEQ ID NO: 1000 - DNA, 1309 bp, Homo sapiens
  misc_feature (1)...(1309): n=a,t,g or c
actttctctctctttcgattcttccatactcagagtacgcacggtctgattttctctttggattcttccaaaatcagagtcagactgctcccggtgccatgaacggagacgacgcctttgcaaggagacccacggttggtgctcaaataccagagaagatccaaaaggccttcgatgatattgccaaatacttctctaaggaagagtgggaaaagatgaaagcctcggagaaaatcttctatgtgtatatgaagagaaagtatgaggctatgactaaactaggtttcaaggccaccctcccacctttcatgtgtaataaacgggccgaagacttccaggggaatgatttggataatgaccctaaccgtgggaatcaggttgaacgtcctcagatgactttcggcaggctccagggaatctccccgaagatcatgcccaagaagccagcagaggaaggaaatgattcggaggaagtgccagaagcatctggcccacaaaatgatgggaaagagctgtgccccccgggaaaaccaactacctctgagaagattcacgagagatctggacccaaaaggggggaacatgcctggacccacagactgcgtgagagaaaacagctggtgatttatgaagagatcagcgaccctgaggaagatgacgagtaactcccctcagggatacgacacatgcccatgatgagaagcagaacgtggtgacctttcacgaacatgggcatggctgcggacccctcgtcatcaggtgcatagcaagtgaaagcaagtgttcacaacagtgaaaagttgagcgtcatttttcttagtgtgccaagagttcgatgttagcgtttacgttgtattttcttacactgtgtcattctgttagatactaacattttcattgatgacgcaagccatacttaatgcatattttggtttgggtatccatgaacctaccnnnngaaaccaagnattgccggttacctctgcatggaccagcattaccctcctctctccccagatgtgactactgaggcagttctgagtgtttaatttcagattttttcctctgcatttacacacacacgacacaaaccacaccacacacacacacacacacacacacacacacacacacacaccaagtaccagtataagcatctgccatctgcttttcccattgccatgcgtcctggtcaagctcccctcactctgtttcctggtcagcatgtactcccctcatccgattcccctgtagcagtcactgcacagttaataaacctttgcaaacgttaaaaaaaaaaaaaaaaaaa

SEQ ID NO: 1001 - DNA, 567 bp, Homo sapiens; identical to SEQ ID NO: 600
  misc_feature (1)...(567): n=a,t,g or c

SEQ ID NO: 1002 - DNA, 299 bp, Homo sapiens
ccgacatgaaggtgtcagctgtgatgcatgtttaaaaggaaattttcgaggtcgcagatataagtgtttaatttgctacgattacgatctttgtgcatcttgttatgaaagtggtgcacaacaacaaggcatacaactgaccacccaatgcagtgcatattaacaagggtagattttgatttatactatggtggggaagctttctctgtagagcagccacagtcttttacttgtccctattgtggaaaatgggctatcgagacatctctcagacctgttacttctaaacatgcagaaca

SEQ ID NO: 1003 - DNA, 269 bp, Homo sapiens
gttaaaacatttttttaaagcagtaagtttatagaaaatgttttcatttaatggaaggctggggaatgtccagcatcaacccctatggcatgcattccagtggccttctcatctgggcctggaacctttgttcagggcttaggggagaacaggccacatggcaacagccacacagtcattgccttcacacagagccacgtgtcccaaacagcatagtcatgccttgtcagctggatctaattgtcatagtcgtgctcctcctgtagact

SEQ ID NO: 1004 - DNA, 263 bp, Homo sapiens; identical to SEQ ID NO: 602

SEQ ID NO: 1005 - DNA, 306 bp, Homo sapiens
ataaaccccaaggcagccatgtcatagactagtgtttactcttgttttgactttgttttaatgcttcctaagacccaagtgcctcctgctgtttcctcctttgtggtagcctctggccatctggacctcaatgcccagctttcccactttcagcagtcctttgctctctttgcttctacctcaaatagccccaggagtgggctttagtctccaatatggagcatctcaagcttctcctggggatgggattggatggcagatctgtttggactccggtattccagtgggtaagcagactggacttcc

SEQ ID NO: 1006 - DNA, 423 bp, Homo sapiens
gttcttttgaatacttaatgacagaacaaatacttggcaaactcctttgctctgctgtcatcctgtgtacccttgtcaatccatggagctggttcactgtaactagcaggccacaggaagcaaagccttggtgcctgtgagctcatctcccaggatggtgactaagtagcttagctagtgatcagctcatcctttaccataaaagtcatcattgctgtttagcttgactgttttcctcaagaacatcgatctgaaggattcataaggagcttatctgaacagatttatctaagaaaaaaaaaaaacgacataaaataagtgaaacaactaggaccaaattacagataaactagttagcttcacagcctctatggctacatggttcttctggccgatggtatgacacctaagttagaacacagc

SEQ ID NO: 1007 - DNA, 103 bp, Homo sapiens
cagctcacgcgggacctggccggcctcccgagtctcttcaagcagctgcccagcccgcccttcctgccggccgccgggacagcagactgccggtaacgcgcgg

SEQ ID NO: 1008 - DNA, 288 bp, Homo sapiens
gtttcaagaacacatgaaattcttttaacaccagattagtgtgttaccccaaatgaacggttctagccctctattaagaaataaagggaccataagcattttggctgcttatggctgtgtgttactacttacaagagtcttgaaaattatacagaactttgccttctttttttaatgtcttccacaatgttgtgactgattataaccctgtttcccctcagagaagagctatggctcagggatctgtgttgactctggcatttagtggctttgtgaaggaaagaaacc

SEQ ID NO: 1009 - DNA, 182 bp, Homo sapiens; identical to SEQ ID NO: 604

SEQ ID NO: 1010 - DNA, 320 bp, Homo sapiens
ctggacaccacttttaaaaagcaatcactgtgctagaaaagtatattggctttgttaggattaaagttcattaacttcaatgtaatcatgcctcctattactgaagtcagattggaaccactaaagatccaaactttctgtctggtaatagaaagtaaaaatctagacatcatttacatttgagaaagctgtttttaacattattttaaaatgccaaatatgttctttctagaaaaatatttatttttgtttttgttggatagcttttaattacatttcagagaggtgtaattttggggtagatgctcattacatttttg

SEQ ID NO: 1011 - DNA, 421 bp, Homo sapiens
tcgacctcctgaatcatgtggttctgcaaatgaataccttcaactaggatttagaccactaagaacttgcacagaaaaacacgcattgaatgtgtgtcgaacctctacattgtgaagttgcactatgtaccatactctaaaatgaaataagaactctttatgtctgtgagagagtgtgtgtgtgtgtgtgcgtgcgtgtgtgcttgtgggggttgggtagtgtgtgtgtattttctctggctttaaaattttaaaacaaacaaacaaaaaagccatagagagcagaacttgccgagggtcatttattgcccaagtttacaagagtagcgatacaagtttttgcaaattgaatttgcctcagatatatctgtcctaatgcttatatttgcacaagtatgtaaaatatcgtgttgaggatcat

SEQ ID NO: 1012 - DNA, 463 bp, Homo sapiens
ctctcaaacttgttttcgaatctcctgggagtgagggagaaacagggagctgaatcctcccccaagctgttccaggccagaggactctgcagtaccttctcctacatctagtaacaaagaatggtgataaccatgcactggttcaaggttctggagttctccatgaaacttgggttaattttgctcagagtatccggagttagccactagctgcgggtgaaatgggatggagtagaacaacagcaggcttcctggagccacatgggctgactagggcactctgtggctggctgcacggctcaccatgaagaggagaaacgatcccttgcctgcccctccctgtggcagggctaactgcctggccctcctggctcgcagcagccagccccctggcagcaggttctcctcagggcttgggtcttcaacctgtggcgacaggaggcagggcagactgtggaggaca

SEQ ID NO: 1013 - DNA, 348 bp, Homo sapiens; identical to SEQ ID NO: 609
  misc_feature (1)...(348): n=a,t,g or c

SEQ ID NO: 1014 - DNA, 532 bp, Homo sapiens; identical to SEQ ID NO: 611

SEQ ID NO: 1015 - DNA, 501 bp, Homo sapiens
tgttaccaatatatccacagaaagaattgcaatttaccaaggttttcacgtgttttgagagaaatcttactgaaagactagtgatgtccattttccagtaaatactgagcgaaaaacaatttttataccccaatctgaggtataaacttgctttttgtgggatcacaactgctgtaaattagacaattgtagcaacaatccaagacaataacagaatgcctatgacagtctgccatattctggtgagtgtctatcaaagctcatcatgattttttgtgagatcttccccgtaattggtagcttggcttccaacaaacatgttccagttctccaatatttcctctttagttagcttctcatccttgtttttgtctgattcatataccagatgcctggcctcagcctgtgcgtgatcataatcttgagggaggatccagtggcgaatctcatctttgtctaacttcccgtcttgttcagatccggaattcgttaactgctccc

SEQ ID NO: 1016 - DNA, 5338 bp, Homo sapiens
ggccgcgagtgcatcttccacgaacctaattcatctctccagcaaaggacacatctctccagcaaaggacacctctctccagcaaaggacacctgcagagatgtccccagtccttcacttctatgttcgtccctctggccatgagggggcagcctctggacacactcggaggaaactgcaagggaaactgccagagctgcagggcgtcgagactgaactgtgctacaacgtgaactggacagctgaggccctccccagtgctgaggagacaaagaagctgatgtggctgtttggttgccccttactgctggatgatgttgctcgggagtcctggctccttcctggctccaatgacctgctgctggaggtcgggcccaggctgaacttctccaccccaacatccaccaacatcgtgtcagtgtgccgcgccactgggctggggcctgtggatcgtgtggagaccacccggcgctaccggctctcgtttgcccaccccccgtcagctgaggtggaagccattgctctggctaccctgcacgaccggatgacagagcagcacttcccccatcccatccagagtttctcccctgagagcatgccggaacccctcaatggccctatcaatatactgggtgagggccggcttgcgctggagaaggccaaccaggagcttggtctggctttagactcttgggacctagacttctacaccaagcgcttccaggagctacagcggaacccgagcactgtggaggcctttgacttggcgcagtccaatagcgagcacagccgacactggttcttcaagggccagctccacgtggatgggcagaagctggtgcactcactgtttgagtccatcatgagcacccaggaatcctcgaaccccaacaacgtcctcaaattctgtgataacagcagtgcaatccagggaaaggaagtccgattcctacggcctgaggaccccacacggccaagccgcttccagcaacagcaagggctgagacatgttgtcttcacagcagagactcacaactttcccacaggagtatgcccctttagtggtgcaaccactggcacagggggccggattcgagatgtccagtgcacaggccgcggggcccacgtggtggctggcactgccggctattgctttggaaatctgcatattccaggttacaatctgccctgggaggatctaagcttccagtatcctgggaattttgcccggcccctggaggttgccattgaagccagtaatggagcttctgactatggcaacaagtttggggaaccagtgctggctggcttcgcccgctccttgggcctccagctcccagacggccagcggcgtgagtggatcaagcccatcatgtttagtgggggcattgggtccatggaagctgaccacataagcaaggaggccccagagccaggcatggaagttgtaaaggttggaggtcccgtctacaggattggagttggaggtggagctgcttcatctgtgcaggtgcagggagataacaccagtgacctggactttggggctgtgcagcgaggagacccggagatggaacagaagatgaaccgtgtgatcagggcttgtgtggaggcccccaagggaaaccccatctgcagccttcatgatcagggcgctggtggcaatggcaatgtcctaaaagagctgagtgacccagctggagccatcatttacaccagccgcttccagcttggggacccaaccctgaatgccctggaaatctggggggctgagtaccaggaatcaaatgctcttctgctgaggtcccccaaccgggacttcctgactcatgtcagtgcccgtgaacgttgcccggcttgcttcgtgggcaccatcactggagaccggagaatagtgctggtggacgatcgggagtgtcctgtcagaagaaatggccagggggatgcccccccgacacccccgccaacccctgtggacctggagctcgaatgggtgctgggcaagatgcctcggaaggagttcttcctgcagaggaagccccccatgctgcagcctctggccttgcccccagggctgagcgtgcaccaggctctggagagggttctgaggctgcccgccgtggccagcaagcgctacctcaccaataaggtggaccgctccgtgggaggcctggtggcccagcagcagtgcgtggggcccctgcaaactcctctggcagatgtagcggttgtggcactgagccatgaggagctcataggggctgccacagccttgggagaacagccagtcaagagcctgctggacccaaaagtcgccgcccggctggccgtggccgaagccctcaccaacctggtgtttgctctggtcactgacctccgggatgtgaagtgtagcgggaactggatgtgggcagccaagctcccaggggagggcgcagctttggcggatgcctgtgaggctatggtggcagtgatggcagccctgggtgtggcagtggatggtggcaaggactccctcagcatggctgctcgggttggcactgagaccgtgcgggctcctgggtcactggtcatctcagcctatgccgtctgcccagacatcacagccactgtgaccccagacctcaagcatcctgaagggagaggccatctgctctatgtggctctgagccctgggcagcaccggctcgggggcacagctctggcccagtgcttctcccagcttggggaacaccctccagacctggaccttcctgagaacttggtgcgggccttcagcatcactcaggggctgctgaaagaccgcctcctctgctcaggccacgatgtcagtgacggaggcctcgtcacatgcctgctggagatggcctttgctggaaattgcgggctacaggtggatgtgcctgtccccagggttgatgtcctgtctgtgctgttcgctgaggagccaggcctcgtgctggaggtgcaggagccagacctggcccaggtgctgaagcgttaccgggatgctggcctccattgcctggagctgggccacacaggcgaggccgggccccacgccatggtccgggtgtcagtgaacggggctgtggttctggaggagcctgttggggagctgcgagccctctgggaggagacgagtttccagctggaccggctacaggcagagcctcgctgtgtggcagaggaggaacggggcctgagggagcggatggggcccagctattgcctgccccccacctttcccaaagcctccgtgccccgtgagcctggtggtcccagcccccgagtcgccatcttgcgagaggagggcagtaatggagaccgggagatggccgatgccttccacttagctgggtttgaggtatgggacgtgaccatgcaggacctctgctctggggcaattgggctggacactttccgtggcgtggccttcgtgggcggcttcagctatgcagatgtcctgggctctgccaaagggtgggcagctgctgtgacctttcatcccagggctggggctgagctgaggcgcttccggaagcggccagacaccttcagcctgggcgtgtgtaatggctgtcaactgctggctctgctcggctgggtgggaggcgaccccaatgaggatgctgcagagatgggccctgactcccagccagcccggccaggccttctgctacgccacaacctgtctgggcgctacgagtctcgctgggccagcgtgcgtgtggggcctgggccagccctgatgctgcgagggatggagggcgccgtgctgcccgtgtggagtgcgcacggggaaggttacgtagcattttcttctccggaactccaagctcagattgaggccaggggcttggctccactgcactgggctgatgatgacgggaaccccacagagcagtaccctctgaatcccaatgggtccccagggggcgtggctggcatctgctcctgtgatggccgccacctggctgtcatgcctcaccctgagcgggccgttaggccttggcagtgggcatggcgaccccctccatttgatactctgaccacctccccctggctccagctctctatcaatgcccgaaactggaccctggaagggagctgctgactggccacaggggctcacctgggccccatggcttttcacctaagtgggtcctgccccctcccccatgaccttcaggagcaccccatattatttccaaaaatatcttggacagacaaggaccaaaatgccaaaatctcagcggactcgatgatctgcctgctgatgttccttctgtggctgtgtctattttcagttctgctctaacatggcatgccctttctcagcccaggaaacagcatgtggttcagagaaaagagcgacaaggaaaagttaggactcctgaggtccgaacaggggcttctgttgcccacttcacaacacccagtgatcaccggtgtgcaattgcctccttggctctgagggatgttttgcgctcccttttctcatcattggggttagcgggtgcagacaaattcagcaatagtatgcagatcagcccctcaccacctcattgttctcatctggaactgaaactttctggatttctcttgaagtgctacactgcactgaatgtaaggaattgttgcttgtggaagtttctcagcgtttctggctgtcttagggctggcctcagaacccagcattcctgttatttgcttctaaattagcagctctctttttttttttttttttgaggcagtctcactctgtcacccaggctggagtgcagtggcgtgatctcggcccactgcaacctctgcctcctgggttcaagcaattttcctgcctcagcctcccgagtagctgggagtacaggcacacaccaccacacccagctaatttttgtatttttagtagagatagggtttcaccgtgtctcccaggctggtctcaaactcctaacctcaagtgattcgcctgcctcggcctcccaaagtgctgggattacaggtgggagccactacagctggcccagcagctctgtttctgatagaggtggttggggctctcatccctagatcctaaccctttagtatgctggaattctactcttcacttactgcattgactgttgttgattagttattattgcaaagcactgccaccggcctcagggagtttatgtgtaatagaattaaaaataatagctgtgtataacacttagctcaagccacgcatgtgtgaggcatttggtatgtatctgaattaattctcactaaaattcagcaaaggacttgatagcctctccccgccttttcaataaaggatgaatgaaggttg

SEQ ID NO: 1017 - DNA, 416 bp, Homo sapiens
caatgggatttacagcaacattttccattgctgaagtgaggtagcagctctcttctgtcagctgaatgttaaggatggggaaaaagaatgcctttaagtttgctcttaatcgtatggaagcttgagctatgtgttggaagtgccctggttttaatccatacacaaagacggtacataatcctacaggtttaaatgtacataaaaatatagtttggaattctttgctctactgtttacattgcagattgctataatttcaaggagtgagattataaataaaatgatgcactttaggatgtttcctatttttgaaatctgaacatgaatcattcacatgaccaaaattgtgtttttttaaaaatacatgtctagtctgtccttaatagctctcttaaataagctatgatattaatcag

SEQ ID NO: 1018 - DNA, 212 bp, Homo sapiens
cggggttgacggctttttggtaggagtgggctggaccggacgccagagacaaaggctcccaaggcaagagggactgtggccctgcgtcggctctgctcgggactgctgaccccaggaatttacggcccttcgtttttctcttctgattcttctcttccgccgccattttaaatccagctccatacaacgctccgccgccgttgctgccgcga

SEQ ID NO: 1019 - DNA, 445 bp, Homo sapiens
  misc_feature (1)...(445): n=a,t,g or c
ttttactgcacaattcacaagcatgttttcctggtgaattggactgaaaattacattttgacaactttttttccttttatccccaacttttgccagaaagcagaaaaatgctctatttttataaagaaagattaaattctccaatgatattttaaaaaatatcaacctacatgcactttagaatgtaaaataacaatgactattttaaactcgaagacccactattttgagtattttttatagactttaaatactgggtttttttcctccttcaatctcagggcttttctccatcttttaaggcagcctctgtaactcccttttgtccataggtgttgcgtgcctctgcatctgtgggggaagtattatttaaataaaatttatgttacagggataactttattttaanggggcnggggcttgtctatacacaagggtatgtatg

SEQ ID NO: 1020 - DNA, 426 bp, Homo sapiens
  misc_feature (1)...(426): n=a,t,g or c
gctgacccaccttgtagtagcgggcagtgtcagggacggggccaaactcctgagtgacggcattncgcacggagttggccttgccgttttcaatgttgatggcaccaatgagcaggttgttggagatgttatccaagtgcccacggaacttgagccaggggccagcagctgagatgtggtcagtggtacacttccctttgaccttgggtggtaagtagagagnacagaggtcagggcatggcctggnangggtggatgacaagccctccagaggcaggcagcaggncccggggccagggaggggtgacagaggggtgagaggcaggcaagtttttcatcacgtgttctgtggtcctgggtgctttccaccctaaagggccacatngggcttcaggccagggctttcattcccttnaaaggcctctg

SEQ ID NO: 1021 - DNA, 449 bp, Homo sapiens
  misc_feature (1)...(449): n=a,t,g or c
gagaatgagtcacacaaactgttcagtgttgcaggaaccttttcttgggggtgggggagtttcccttttctaaaaatgcaatgcactaaaactattttaagaatgtagttaattctgcttattcataaagtgggcatcctctgttttaggtgtaatatcgaagtcctggcttttctcgttttctcacttgctctcttgttctctgtttttttaaaccaattttactttatgaatatattcatgacatttgtaataaatgtcttgagaaagaatttgtttcatggcttcatggtcatcactcaagctcccgtaaggatattaccgtctcaggaaaggatcaggactccatgtcacagtcctgccatcttactttcctcttgtcggagttctggagtgggaaatnaactggcattatgggccgctttaaccncaggncattcaaaagaaac

SEQ ID NO: 1022 - DNA, 433 bp, Homo sapiens
  misc_feature (1)...(433): n=a,t,g or c
tcgatgcccttatttgtgagttaaagagaaaatatcataaatggtatactcttaagtatagaggttttgtatctagaggatctcagttcaactcctgtctctccatataccagcagtgtaactgtgaataacatacttaaatggctgtgcttatttccttttcttttcttttttctttttttttttttttgagatgaagttttgctcttgttccccaggnctggagtgcaatggcacgatctcggttcactgcaacctccacctctcagattcaaggcaattctcctgcctcagcctcccaagtaggctggggattacaggtgcccaccaccacccnggggctaaaatttgtatttttcagtaggagacgggggtttnccccatgttnggttagggctcgttntaggaacctctggaccccaggtgantccca

SEQ ID NO: 1023 - DNA, 3705 bp, Homo sapiens
ggaattcccggccgggcgcacccgcggggccctgggctcgctggcttgcgcgcagctgagcggggtgtaggttggaagggccagggcccctggggcgcaagtgggggccggcgccatggaacccccgaccgtcccctcggaaaggagcctgtctctgtcactgcccgggccccgggagggccaggccaccctgaagcctcccccgcagcacctgtggcggcagcctcggacccccatccgtatccagcagcgcggctactccgacagcgcggagcgcgccgagcgggagcggcagccgcaccggcccatagagcgcgccgatgccatggacaccagcgaccggcccggcctgcgcacgacccgcatgtcctggccctcgtccttccatggcactggcaccggcagcggcggcgcgggcggaggcagcagcaggcgcttcgaggcagagaatgggccgacaccatctcctggccgcagccccctggactcgcaggcgagcccaggactcgtgctgcacgccggggcggccaccagccagcgccgggagtccttcctgtaccgctcagacagcgactatgacatgtcacccaagaccatgtcccggaactcatcggtcaccagcgaggcgcacgctgaagacctcatcgtaacaccatttgctcaggtgctggccagcctccggagcgtccgtagcaacttctcactcctgaccaatgtgcccgttcccagtaacaagcggtccccgctgggcggccccacccctgtctgcaaggccacgctgtcagaagaaacgtgtcagcagttggcccgggagactctggaggagctggactggtgtctggagcagctggagaccatgcagacctatcgctctgtcagcgagatggcctcgcacaagttcaaaaggatgttgaaccgtgagctcacacacctgtcagaaatgagcaggtccggaaaccaggtctcagagtacatttccacaacattcctggacaaacagaatgaagtggagatcccatcacccacgatgaaggaacgagaaaaacagcaagcgccgcgaccaagaccctcccagccgcccccgccccctgtaccacacttacagcccatgtcccaaatcacagggttgaaaaagttgatgcatagtaacagcctgaacaactctaacattccccgatttggggtgaagaccgatcaagaagagctcctggcccaagaactggagaacctgaacaagtggggcctgaacatcttttgcgtgtcggattacgctggaggccgctcactcacctgcatcatgtacatgatattccaggagcgggacctgctgaagaaattccgcatcccggtggacacgatggtgacatacatgctgacgctggaggatcactaccacgctgacgtggcctaccataacagcctgcacgcagctgacgtgctgcagtccacccacgtactgctggccacgcctgcactagatgcagtgttcacggacctggagattctcgccgccctcttcgcggctgccatccacgatgtggatcaccctggggtctccaaccagttcctcatcaacaccaattcggagctggcgctcatgtacaacgatgagtcggtgctcgagaatcaccacctggccgtgggcttcaagctgctgcaggaggacaactgcgacatcttccagaacctcagcaagcgccagcggcagagcctacgcaagatggtcatcgacatggtgctggccacggacatgtccaagcacatgaccctcctggctgacctgaagaccatggtggagaccaagaaagtgaccagctcaggggtcctcctgctagataactactccgaccgcatccaggtcctccggaacatggtgcactgtgccgacctcagcaaccccaccaagccgctggagctgtaccgccagtggacagaccgcatcatggccgagttcttccagcagggtgaccgagagcgcgagcgtggcatggaaatcagccccatgtgtgacaagcacactgcctccgtggagaagtctcaggtgggttttattgactacattgtgcacccattgtgggagacctgggcggaccttgtccacccagatgcccaggagatcttggacactttggaggacaaccgggactggtactacagcgccatccggcagagcccatctccgccacccgaggaggagtcaagggggccaggccacccacccctgcctgacaagttccagtttgagctgacgctggaggaggaagaggaggaagaaatatcaatggcccagataccgtgcacagcccaagaggcattgactgcgcagggattgtcaggagtcgaggaagctctggatgcaaccatagcctgggaggcatccccggcccaggagtcgttggaagttatggcacaggaagcatccctggaggccgagctggaggcagtgtatttgacacagcaggcacagtccacaggcagtgcacctgtggctccggatgagttctcgtcccgggaggaattcgtggttgctgtaagccacagcagcccctctgccctggctcttcaaagcccccttctccctgcttggaggaccctgtctgtttcagagcatgccccgggcctcccgggcctcccctccacggcggccgaggtggaggcccaacgagagcaccaggctgccaagagggcttgcagtgcctgcgcagggacatttggggaggacacatccgcactcccagctcctggtggcggggggtcaggtggagaccctacctgatccccagacctctgtccctgttcccctccactcctcccctcactcccctgctcccccgaccacctcctcctctgcctcaaagactcttgtcctcttgtccctcctgagaaaaaagaaaacgaaaagtggggtttttttctgttttctttttttcccctttccccctgcccccacccacggggcctttttttggaggtgggggctggggaatgaggggctgaggtcccggaaggattttatttttttgaattttaattgtaacatttttagaaaaagaacaaaaaaagaaaaaaaaaagaaagaaacacagcaactgtagatgctcctgttcctggttcccgctttccacttccaaatccctcccctcaccttcccccactgccccccaagttccaggctcagtcttccagccgcctggggagtctctacctgggcccaagcaggtgtggggcctccttctgggcttttcttctgaatttagaggatttctagaacgtggtcaggaatagccattctaggcggggctggggccagggtggggggcagtcactgtgggaggtcccagctccagcccccctctggtttgctgcctcctctcccctctaaaaaagtcttccgcttgattttgcacaatcccggcgatactcctggcgatactgactagaagtcagggagctgggggagctgttcactttaggatacggggggatggaagggagcgttcacaccgccagcctcgggcctgggatttgaggagggccctagacctcctccactctccatcccctttcccttccactttgggttcactttgaattttctccgttttttggggcagtggctctgatccactcacccccccgccccgtaagttatagccactgtggaaagtagtatgaaagttcctcaagaaactaaaaatggaattc

SEQ ID NO: 1024 - DNA, 383 bp, Homo sapiens; identical to SEQ ID NO: 616
  misc_feature (1)...(383): n=a,t,g or c

SEQ ID NO: 1025 - DNA, 375 bp, Homo sapiens; identical to SEQ ID NO: 617
  misc_feature (1)...(375): n=a,t,g or c

SEQ ID NO: 1026 - DNA, 339 bp, Homo sapiens
  misc_feature (1)...(339): n=a,t,g or c
tatttaaagggatagttgattcctggggtgttttgaaattaagttggaattaagttgcttaagcatatttatgttgtgagaaacccttaatatgaggtttatcatgccatttttcaagcagatttatgagcagatttctgtcacataagtcgtcttctgcttgagtatcctaatatttcaatgcatcaggggagcgctccactggataagcattttatttcccgcatggcataatgtttttgcacctaaaaggctcaaagtgtgagaacctggttcctggatttgtttgaaattntttcaccaataaaagatcataaatnaaatggtttctttcangaa

SEQ ID NO: 1027 - DNA, 222 bp, Homo sapiens; identical to SEQ ID NO: 618

SEQ ID NO: 1028 - DNA, 359 bp, Homo sapiens
  misc_feature (1)...(359): n=a,t,g or c
nggcttcaacaaacaggccccttctttccataccaccacagtcacctgaccaaataaacggagaaagcttccagaacgtgagcaaaaatgctagttctgcagcgaatgcccaacctcataaactgtctgaaaccccagggcactaaagcagagtttcatccctgtctttaaactgggggtatgtccactctaggcaagtaaaaaaactactgttacacgttccagtaactctgtcaatattttcttgtatcaggaattgttattatggcagcctttcatttggggctgggttttcatcatttttgcactgtggaantggcttttacagtggcattacttacaggccaggaaggaacata

SEQ ID NO: 1029 - DNA, 403 bp, Homo sapiens; identical to SEQ ID NO: 620
  misc_feature (1)...(403): n=a,t,g or c

SEQ ID NO: 1030 - DNA, 415 bp, Homo sapiens
  misc_feature (1)...(415): n=a,t,g or c
atatgctttcactgtttgtgcaatatgcatttatttcttatatgaatgctttaaagtcatttgaggttagatcttttaattcctattttctgcttcattggtcactttttttttattgtagtataagatgttagattctgtaatcttcacattcattttagcaggtactgagtgatgctgtatatacaaataagtgtattgttttgatttttagaccaccacatgggcatgcttgactatttcttatttcaaatgtctgctaatgcagagtaggctactccatgatagtgttaaaaaacaaaatttgctaacaatgtgatataaagactttaaaagttacacattatgtgggagccctatctttacaaaagtttccnactgttaaggtgcnttttatttttccggtttcacntgg

SEQ ID NO: 1031 - DNA, 511 bp, Homo sapiens; identical to SEQ ID NO: 622
  misc_feature (1)...(511): n=a,t,g or c

SEQ ID NO: 1032 - DNA, 401 bp, Homo sapiens
  misc_feature (1)...(401): n=a,t,g or c
taagggtggactagtaataaaatataatattcttgctgcttatgcantggacattgttgccctccctaaagcaaccaagtagcctttatttcccacagtgaaagaaaacgctggcctatcagttacattacaaaaggcagatttcaagaggattgagtaagtagttggatggctttcataaaaacaagaattcaagaagaggattcatgctttaagaaacatttgttatacattcctcacaaattatacctggggataaaaactatgtaggcagggcagtgtgttttccttccatgtctctctggcactacctgncagtgtgttcctctggagggctggcaagtctgttcctattctgaatttcccaggcaggaaggcactaaggaaggttcccaacctnt

SEQ ID NO: 1033 - DNA, 1346 bp, Homo sapiens
  misc_feature (1)...(1346): n=a,t,g or c
cagacaatgaggatgaagatgaagatgtcaaagctgaaagactaaaggtcaaagagctgatgggttgccagtgttgtgaggagaaaccatccattatggtcagcaatttgcataaagaatatgatgacaagaaagattttcttctttcaagaaaagtaaagagagtggcaactaaatacatctctttctgtgtgaaaaaaggagagatcttaggactattgggtccaaatggtgctggcaaaagcacaattattaatattctggttagtgatattgaaccagcttcaggccaggtatttttaggagattattcttcagagacaagtgaagatgatgattcactgaagtgtatgggttactgtcctcagataaaccctttgtggccagatactacattgcaggaacattttgaaatttatggagctgtcaaaggaatgagtgcaagtgacatgaaagaagtcataagtcgaataacacatgcacttgatttaaaagaacatcttcagaagactgtaaagaaactacctgcnaggaatcaaacgaaagtgtgttttgctctaagtatgctagggaatcctcagattactttgctagatgaaccatctacaggtctggatcccaaatgccaaacatgcacatgtggcatgcaattcgaactgcatnnaagcgggctgctattctgaccactcactatatggaggaggcagaggctgtctgtgatcgagtagctatcatggtgtctgggcagttaagatgtatcggaacagtacaacatctaaagagtaaatttggaaaagnactttttggaaattaaattgaacggactggatagaaaacctagaagctagaccgccttcaaagagaaattcagtatattttcccaaatgcaagccgtcagaaagtttttcttctattttggcttctaaaattaataaggaagatgttcagtccctttcccaatctttttttaagctggaagaagctaaacatgctttgccattgaagaatatagctttctcaagcaacattggaacaggtttttgtagaactcactaaagaacaagaggaggaagataatagttgtggaactttaaacagcacactttggtggaacgaacacaagaagatagagtagtattttgaatttgtattgttcggtctgcttactgggacttctttctttttcacttaattttaactttggtttaaaaagttttttattggaatggtaactggagaaccaagaacgcacttgaaatttttctaagctccttaattgaaatgctgtggttgtgtgttttgcttttctttaaataaaacgtatgtataattaagtgaaaaaaaaa

SEQ ID NO: 1034 - DNA, 3282 bp, Homo sapiens
gggacagggctgaggatgaggagaaccctggggacccagaagaccgtgccttgcccggaagtcctgcctgtaggcctgaaggacttgccctaacagagcctcaacaactacctggtgattcctacttcagccccttggtgtgagcagcttctcaacatgaactacagcctccacttggccttcgtgtgtctgagtctcttcactgagaggatgtgcatccaggggagtcagttcaacgtcgaggtcggcagaagtgacaagctttccctgcctggctttgagaacctcacagcaggatataacaaatttctcaggcccaattttggtggagaacccgtacagatagcgctgactctggacattgcaagtatctctagcatttcagagagtaacatggactacacagccaccatatacctccgacagcgctggatggaccagcggctggtgtttgaaggcaacaagagcttcactctggatgcccgcctcgtggagttcctctgggtgccagatacttacattgtggagtccaagaagtccttcctccatgaagtcactgtgggaaacaggctcatccgcctcttctccaatggcacggtcctgtatgccctcagaatcacgacaactgttgcatgtaacatggatctgtctaaataccccatggacacacagacatgcaagttgcagctggaaagctggggctatgatggaaatgatgtggagttcacctggctgagagggaacgactctgtgcgtggactggaacacctgcggcttgctcagtacaccatagagcggtatttcaccttagtcaccagatcgcagcaggagacaggaaattacactagattggtcttacagtttgagcttcggaggaatgttctgtatttcattttggaaacctacgttccttccactttcctggtggtgttgtcctgggtttcattttggatctctctcgattcagtccctgcaagaacctgcattggagtgacgaccgtgttatcaatgaccacactgatgatcgggtcccgcacttctcttcccaacaccaactgcttcatcaaggccatcgatgtgtacctggggatctgctttagctttgtgtttggggccttgctagaatatgcagttgctcactacagttccttacagcagatggcagccaaagatagggggacaacaaaggaagtagaagaagtcagtattactaatatcatcaacagctccatctccagctttaaacggaagatcagctttgccagcattgaaatttccagcgacaacgttgactacagtgacttgacaatgaaaaccagcgacaagttcaagtttgtcttccgagaaaagatgggcaggattgttgattatttcacaattcaaaaccccagtaatgttgatcactattccaaactactgtttcctttgatttttatgctagccaatgtattttactgggcatactacatgtatttttgagtcaatgttaaatttcttgcatgccataggtcttcaacaggacaagataatgatgtaaatggtattttaggccaagtgtgcacccacatccaatggtgctacaagtgactgaaataatatttgagtctttctgctcaaagaatgaagctccaaccattgttctaagctgtgtagaagtcctagcattataggatcttgtaatagaaacatcagtccattcctctttcatcttaatcaaggacattcccatggagcccaagattacaaatgtactcagggctgtttattcggtggctccctggtttgcatttacctcatataaagaatgggaaggagaccattgggtaaccctcaagtgtcagaagttgtttctaaagtaactatacatgttttttactaaatctctgcagtgcttataaaatacattgttgcctatttagggagtaacattttctagtttttgtttctggttaaaatgaaatatgggcttatgtcaattcattggaagtcaatgcactaactcaataccaagatgagtttttaaataatgaatattatttaataccacaacagaattatccccaatttccaataagtcctatcattgaaaattcaaatataagtgaagaaaaaattagtagatcaacaatctaaacaaatccctcggttctaagatacaatggattccccatactggaaggactctgaggctttattcccccactatgcatatcttatcattttattattatacacacatccatcctaaactatactaaagcccttttcccatgcatggatggaaatggaagatttttttgtaacttgttctagaagtcttaatatgggctgttgccatgaaggcttgcagaattgagtccattttctagctgcctttattcacatagtgatggggtactaaaagtactgggttgactcagagagtcgctgtcattctgtcattgctgctactctaacactgagcaacactctcccagtggcagatcccctgtatcattccaagaggagcattcatccctttgctctaatgatcaggaatgatgcttattagaaaacaaactgcttgacccaggaacaagtggcttagcttaagtaaacttggctttgctcagatccctgatccttccagctggtctgctctgagtggcttatcccgcatgagcaggagcgtgctggccctgagtactgaactttctgagtaacaatgagacacgttacagaacctatgttcaggttgcgggtgagctgccctctccaaatccagccagagatgcacattcctcggccagtctcagccaacagtaccaaaagtgatttttgagtgtgccagggtaaaggcttccagttcagcctcagttattttagacaatctcgccatctttaatttcttagcttcctgttctaataaatgcacggctttacctttcctgtcagaaataaaccaaggctctaaaagatgatttcccttctgtaactccctagagccacaggttctcattccttttcccattatacttctcacaattcagtttctatgagtttgatcacctgatttttttaacaaaatatttctaacgggaatgggtgggagtgctggtgaaaagagatgaaatgtggttgtatgagccaatcatatttgtgattttttaaaaaaagtttaaaaggaaatatctgttctgaaaccccacttaagcattgtttttatataaaaacaatgataaagatgtgaactgtgaaataaatataccatattagctacccaccaaaaaaaaaaaaaaaaaa

SEQ ID NO: 1035 - DNA, 563 bp, Homo sapiens; identical to SEQ ID NO: 626
  misc_feature (1)...(563): n=a,t,g or c

SEQ ID NO: 1036 - DNA, 744 bp, Homo sapiens
  misc_feature (1)...(744): n=a,t,g or c
ttnnntactccggngatgaagacagagcagtacaggtgaccaagaaaaaaaagaagaaacaacacaagattccaacaaatgacgaattactgtntgatcctgaaaaagataacagagatcaggcctgggttgatgcacagagaaggggttaccatggtttgggaccacagagatcacgtcaacaacagcctgttccaaatagtgatgctgtcttganttgtcctgcctgcatgaccacactttgccttgattgccaaaggcatgantcatacaaaactcaatatagagcaatgtttgtaatgaattgttctattaacaaagaggaggttctaagatataaagcctcagagaacaggaagaaaaggcgggtcccataagaagatgaggtcttaacccgggaagatgctgccgagaaggcagagacagattgtggaagaaatcttatcacccagtcatgtgcactgattgtcccctgaaggtggnagcttcgacaaggtgattcatgtncgtgtncnnnnnnnnnnnnnnnnnnnnnnnnnncccgnnnntcnnnnnnnnnnnnnnnnnnnnnnnnnnnnnnnnnnnnnnnnnnnnnncnnnnncnnnnnnncnnncnnnnnnnnnncnnnnnnnnnnncnnnnnnnnnncnnnnnnnnnnnnnnnnnnnncnnnnnnnnnnnnnnnnnnnnnnnnnnnnnnnnnnnnnnnnnnnnnnnnnnnnnnnncnnnnnncnnncnnnnct

SEQ ID NO: 1037 - DNA, 773 bp, Homo sapiens
  misc_feature (1)...(773): n=a,t,g or c
cnnnnnttcntgtnntcngaagagagtgacaagaatggagtaacacatgaactagcactctcctcatgtgacagagagtacatctgacccacatggtggcaggacacaggggaagggctctcagagctggtgccaagtgtccaccaaagaaagtcccattcaccagagacaggctgtttccttggactccaccatctctgttacagctaccagccaggtctccatgatcttcctggaatccttcatgccagcatcagttcatgctctctgagcttgtcactcccgactctttcaagacccaggtcaactgncccatggntcacccacccaggncgnctccggagtcctgcagnacatctctttgggtatgctgctgccctgctgccctcaagggnatngttgtgggtagggggagaacatcaacatcacattaccannggaancagaggggtacattagtanncganantgggcatggcggacaacccanaggacacatgntcctccccaantnntnctaatccncaagngtgggttcaanttggnttancaggtnantggtaaannggttnnccngnnnnttgncaannnnnnnnnnnnnnntnncannnnnnnnnnnnnnnnnnnnnnnnnnnnnnnnnnntnnntnncnnnnnnnnnnnnnnnnnnnnnnnnnnnnnnnnnnnnnnnnnnnnnnnnnnnnnnnnnnnnnnnnnnnnnnnnnnnnnnnnnnnnnnnnnnnnnnnnnnnnnnnnnnnnnnnnnnnnnnnnng

SEQ ID NO: 1038 - DNA, 2191 bp, Homo sapiens
tcgagcggccacccgggcaggtctctgggtgaatagcagcgtgtccgccggcagcgaaccgagaccagcgagccgaccatgcggctgcacagacttcgtgcgcggctgagcgcggtggcctgtgggcttctgctgcttcttgtccggggccagggccaggactcagccagtcccatccggaccacacacacggggcaggtgctggggagtcttgtccatgtgaagggcgccaatgccggggtccaaaccttcctgggaattccatttgccaagccacctctaggtccgctgcgatttgcaccccctgagccccctgaatcttggagtggtgtgagggatggaaccacccatccggccatgtgtctacaggacctcaccgcagtggagtcagagtttcttagccagttcaacatgaccttcccttccgactccatgtctgaggactgcctgtacctcagcatctacacgccggcccatagccatgaaggctctaacctgccggtgatggtgtggatccacggtggtgcgcttgtttttggcatggcttccttgtatgatggttccatgctggctgccttggagaacgtggtggtggtcatcatccagtaccgcctgggtgtcctgggcttcttcagcactggagacaagcacgcaaccggcaactggggctacctggaccaagtggctgcactacgctgggtccagcagaatatcgcccactttggaggcaaccctgaccgtgtcaccatttttggcgagtctgcgggtggcacgagtgtgtcttcgcttgttgtgtcccccatatcccaaggactcttccacggagccatcatggagagtggcgtggccctcctgcccggcctcattgccagctcagctgatgtcatctccacggtggtggccaacctgtctgcctgtgaccaagttgactctgaggccctggtgggctgcctgcggggcaagagtaaagaggagattcttgcaattaacaagcctttcaagatgatccccggagtggtggatggggtcttcctgcccaggcacccccaggagctgctggcctctgccgactttcagcctgtccctagcattgttggtgtcaacaacaatgaattcggctggctcatccccaaggtcatgaggatctatgatacccagaaggaaatggacagagaggcctcccaggctgctctgcagaaaatgttaacgctgctgatgttgcctcctacatttggtgacctgctgagggaggagtacattggggacaatggggatccccagaccctccaagcgcagttccaggagatgatggcggactccatgtttgtgatccctgcactccaagtagcacattttcagtgttcccgggcccctgtgtacttctacgagttccagcatcagcccagctggctcaagaacatcaggccaccgcacatgaaggcagaccatggtgatgagcttccttttgttttcagaagtttctttgggggcaactacattaaattcactgaggaagaggagcagctaagcaggaagatgatgaagtactgggccaactttgcgagaaatgggaaccccaatggcgagggtctgccacactggccgctgttcgaccaggaggagcaatacctgcagctgaacctacagcctgcggtgggccgggctctgaaggcccacaggctccagttctggaagaaggcgctgccccaaaagatccaggagctcgaggagcctgaagagagacacacagagctgtagctccctgtgccggggaggagggggtgggttcgctgacaggcgagggtcagcctgctgtgcccacacacacccactaaggagaaagaagttgattccttcattcacttcgccattcattcatacttccgtccagaagttgattccttcattcacttcgccattcattcatacttccgtccatccattcagaaaccggyatttattaagaatttactcaggcatgatggcccatacttgtaatcccagctattgggaaggatgagatgggaggatggcttgaggccagaggtttgagaccgaccagccagggcaacacagtgagaccccttctcaaaaaaaaaaaaaaaaaaagagagagtgtgtgattagaagctaaataggaaagttttgagcttcaagtcagtgaggagtaaaaaagatttttaaaaagcaa

SEQ ID NO: 1039 - DNA, 265 bp, Homo sapiens; identical to SEQ ID NO: 630

SEQ ID NO: 1040 - DNA, 403 bp, Homo sapiens
ttttttttttcaaagaaacactagcaatttattgattttctctatttccaaaaaaagcaaatacattagtgtatcacacaaggaaactgggcctggccggcacaaggttcctctacaaacatgaagcaaggggaaggtgggctacagggaagctccaagatccctcacagcagcccccggttcccttccctgcccaccccagccgcagtcttggtcctgccagccagttcagccagattccaaggtggacatgcagacagcaacactgcctcttgggtccccaggaggagtgtggagtcagggctgctagtgtggtccccactgcagaggtggctggtggccaatgactggatttgtcattggccgctagcacaggagatcccagggcagagtctgtgtcctt

SEQ ID NO: 1041 - DNA, 491 bp, Homo sapiens; identical to SEQ ID NO: 631
  misc_feature (1)...(491): n=a,t,g or c

SEQ ID NO: 1042 - DNA, 516 bp, Homo sapiens; identical to SEQ ID NO: 633

SEQ ID NO: 1043 - DNA, 233 bp, Homo sapiens; identical to SEQ ID NO: 635

SEQ ID NO: 1044 - DNA, 297 bp, Homo sapiens
ttttttttttttttttttttttggttgttgcacctactttaatgacaacttcaaaaaaggaacaacatccatccacttcttaatgtctttatgaacacagaggctagagtccccagccagcttctgaggcagccctgcacatcctgcaggtggccacactcaacccatgccacaccgtttgcttaaagctacaagtcctagagctgaagaactggcaagccagtgcgtgaagcttatcgacagcgcttccaggcacacgagcaaagctgcgcagatacaggggaggttccttggggc

SEQ ID NO: 1045 - DNA, 563 bp, Homo sapiens
  misc_feature (1)...(563): n=a,t,g or c
ttaatcaactctgctgttgttgctgcttcttagcaaaactggtaaaaacaaaattgtaatcattgaacatagcactctggcaatcaagacgcttaaaaccttcaatcttctggggcgacaagcactgtgcgacatttagaactctgattaacaaacaaggtggtcacaaattttcctggcttgaagacttctacaactttcctgatcaggtcatcataggaggtctgacttaagtttgtttcaaagctaacataagaaaattctggttctggagtgatgtgaataagtccaataagttccatcccgatttcattccattcatccgaatacccacaaggattgaacattgtggcatcaatgacagaacctggtatcaggtcacgaattccactctcacgagtgacatcccttgcagtaacaccatctttcatgtagaactggtccataactgctgggtcaagctcactcatcagaatttcccagggttgatctggctgactgattaccccnctcctctgggnaatccaggnatataagtaccacagtcaggattcctacgtccc

SEQ ID NO: 1046 - DNA, 446 bp, Homo sapiens
tttttacacaaagaaaaagattttattgtcttcttagtcaatatccctggtgaaattagaggcatagcttgagactggtgacagtgcaacacagaccttcaggagctgctttgaggactggcctgcccagatgcctgctgttaagccagcagccccctcactccggcccctgccatcttgacagatggagctgccatggtttcagggacactcagcagggcatctgggttggtccctcccacatggaccttgtaaagttgctattcaggggaacctggtatcgtttcaggcaaaacacagaaccatattagcacttctaagccccctgccccggccgcctccccggaacatttgggcttgtcgcacattccaggagggagcaggagcacagctgcagccacagctgccaggaacaggcctgggctcccgcctgtgtggggggaagg

SEQ ID NO: 1047 - DNA, 273 bp, Homo sapiens
cacaaacaaagatggtttaatagatttcagcatgtttccacttgacaatgttatacgaaaatagaatctttattaaaatagcaaggcataacaatcactgctactcaggaaacactgtgtttattctttttaatcatcaaaatcaatgactttgggcaagacctgtgaaatctcagagcctgtttctccatctggagaacaggcaggtagggcattgccagctccctgtgagtgggggccactggtgggaggagatggccctggtcgcccatg

SEQ ID NO: 1048 - DNA, 496 bp, Homo sapiens
tagttattaaaatacatttaatgcttggtattgtgaacatgcagacgaaagaaaataagattacaaaatgaaataagagctagaattaaaagccgatgtataggaaatgttctcaactgtgcaagtgattaacagccagatgttcccctacgattccaaacatgagtccccagtgccaagttccagccccaactctgctggagtctcagagaaaatgtatagtaacaaaagcagccaagacttgtgtggcgtccgtcttatttcttcttgagtttttgtcccgtggatgtgaatcactaagaacacatgcattcctcaagttttaagaagataaataaggtggaaaaaaataaatcttagggatttgcttcaattcttatttaagcttcatggaatgcaaacataggaggctaaagcagaaataagtattgcttcagtgatcatgagtccagccagcttagtaaacaaaacaggggttaccttcctaaccttctaa

SEQ ID NO: 1049 - DNA, 245 bp, Homo sapiens
tttttcaaattagaattcttttaatataaaaaaaagtactaaaatacccacgtggttctgctgtgttatttgccctaaaggaagtgaggggcagagtgaagaatcccagtgcagctcagtgggcccagaaatggcgtttccggtaggctaaggcgtgcccactccacctccaccagacttctatcccctctgctgttcccagcccccaattcctgcagcaggaaaccccagtggtctggctttgg

SEQ ID NO: 1050 - DNA, 388 bp, Homo sapiens
tgggggtaggctctttattagacggttattgctgtactacagggtcagagtgcagtgtaagcagtgtcagaggcccgcgttcagcccaagaatgtgggatttctctccctattgatcacagtgggtgggtttcttcagaaaagccccagaggcagggaccagtgagctccaaggttagaagttggactggaaggcttcagtcacatgctgctttcaagctttcaggctgggcaacaaggaggagatgcccatgacgtgccagggtctccccatctgacaccagtgaagtctggtaagacagcagccgcacgcctgcctctgccaggagggcaatcatggtaggcagcattgcagggtcagaggtctgagtccggaataggagcaaggg

SEQ ID NO: 1051 - DNA, 384 bp, Homo sapiens; identical to SEQ ID NO: 639

SEQ ID NO: 1052 - DNA, 382 bp, Homo sapiens
ttgaaaataacaaaaaaaccaaactttacttgcatttagccattaataaataatttacagtatgtacacgcggtgacactccacacaggtcgcagaacggtggacgcagtgaggggtccccacttccaagcagaacgtgagcaaacacaaccaaaataaagtgcttcactttttacttccaacatagggaccaactaaaaccagcagggagagggaggggccgggccgagtcgccctcccacccgcccacacacggttctggcagagggagcaggacctcttggagggagggggagacacacgttctgcagcctcctggccagtgtatgagaggtccctggggaacagcagaggggctgccgatgggtgggtagggtgtgga

SEQ ID NO: 1053 - DNA, 478 bp, Homo sapiens; identical to SEQ ID NO: 641

SEQ ID NO: 1054 - DNA, 469 bp, Homo sapiens
agtattatcatttattgagtagctacactgtggccagaactaagctttacatgttttatatcacttatttatctcaacaatcttgaaagggtggtattattttccccgtcttataggtgaagactctgaggttcagaaagttaaagtgatatcgccagggttcctgactggtaagtgatggaggctgaatttgagccagatctatatgctccatcatcactctcctggggaaaagagcctagatgtgttctatctgcattcctgcttagattctgcatgacttctcctgtccatccccttggccccctctcctctagtccatgagattacagctttgcacactgacaggagggtccttccttcttagcctacacatacaaccaggtgtcaaaggatggaagggttcatctcacacactcacagaccatgtagactattcaatctacacctccagctcgaactcagaaca

SEQ ID NO: 1055 - DNA, 363 bp, Homo sapiens
taatatttgaagaaatttattgagtcaaatatgagtgaccatgccccatgacacagccctcagaaggtcctgaggacatgtggcaaaggtgttcttcaaagtgttcattattaaggcatccatctcccataacttcaatgcactttgctaaacaatgcattatttctgaggacatctgaatctgtttctgtaccaatggtcttaatcagaacatcacataaattgccacatctgtgtgagatactcaggaccacggactctcacacactccagaagaaaaggcacggattctgctgctgcccctccaacaccattgtggaaataaaatttcagtaaagggaccaccagtttgacaacctgctt

SEQ ID NO: 1056 - DNA, 120 bp, Homo sapiens
ttttttttttttttttttttttttttttttttttttttttgcaggaagactatgtctagagcgaaggctacacagaccccacgatgggggagtggggcctgaggtgggagaggcctggag

SEQ ID NO: 1057 - DNA, 586 bp, Homo sapiens
tttttcctgttttgaaagtgttttaattagacaaaagcatcaggacaaaccattttaaaaacaaagtcttcaacttgggtgttgagattggcaaaaggggaagcaagggaaaagccaaggaaagataaaatattcagaagaaagtcaaagttatctgcaattacatgttagaacagattttgcaggttaaaaagatgttgcttaaatatattcataagcctgttgtaagattttcacttatgcagtttcagaaaatttagctgcttaacatatgacagaactgtattttaacaaatgacattaaaagtcaggagagctactcagttaattgataaagtagaggcaacgtgggggagccctccccacgtttattgaagatttgtggctcccccagccccgtttgcctgcatcaggctaacaacctcattcctcccatagagcctggccaaatcacaggcggtggtccccttatggttccgatgccccacattgctggccgtgtgcttcaccagggactccaccaccgggaggtgggccttctttgggcagccaagtgcaagggcaggttcccttcattatcctcgat

SEQ ID NO: 1058 - DNA, 451 bp, Homo sapiens
ttttttcacgtgtaagatttttattcaaatttgatttacattccaaaagaaattataaaatgtattcacttgtttataaaaaaaatttgtggggggacaaaactttaattcaaattataaaacatgataaattttcagattaaaattgggcaagttgcttggagtaacaagtttttaaatcaccattttccacctccacaccaaggataaccttctaattaatgatcagccatgttgtaataggatagcactgagacttgaggaaacagaaaaactgaagagctcttccaagccccgaccaggaacatttttatgccttctcatagtggcgaacagcaaccacatcaccaaaagtaagggtcataaccattttgccatccttaatttctcttacaaaatttgtttctttgccatcccatttctgtatgtgaacaagtttgtctccatccag

SEQ ID NO: 1059 - DNA, 315 bp, Homo sapiens; identical to SEQ ID NO: 648

SEQ ID NO: 1060 - DNA, 323 bp, Homo sapiens
ttaacagttaaacttttatatttacaatattctcttcatcttttgccaggtttaaaaatgtgtacagagccgcaaagggttggggtagggataagggattgtcgggattgttttggggagaggagctgggcattggagtccgtggctgaatcatggggtcccccagcccccctcccatgccccaattctgagggcatctgtctacagggttcagggcccaggtctctagcatttggagggcatggctgtttggagaggagctagaccaggcaggggaaaggatcagaaaataactaattttccatggatggaggtaggaagag

SEQ ID NO: 1061 - DNA, 503 bp, Homo sapiens
tttttgtaatcctttaaaaatattttattaagcattgatttagaaaacgcaagacaagattgtaacacctcagggcaaaggcttgaaggtgaaacaaataacactataaatattgcacttctaaaatctttttttgacatcttcacacaactcaattctaaaatatccttttacagagatgtataaataaacgcttccaagctgtcaacgcttgacacttttagcttcctatcaccgcactaagtcggcaggtttccaatcagatagctgctcctctgacagcaggcaaagaacttccctcagctatctcggaggcctcatacctccatcatgtgaagagtcaaccagtcccatctttcggaatgctctttcagaatatgtaattttataagtatttttttttctactgagagaacatagatctttcaaaggcaatggcagaatacagcttaaatggacacagttcactgttaacattgcttattttttaaggcatccaggag

SEQ ID NO: 1062 - DNA, 315 bp, Homo sapiens; identical to SEQ ID NO: 650

SEQ ID NO: 1063 - DNA, 495 bp, Homo sapiens; identical to SEQ ID NO: 651

SEQ ID NO: 1064 - DNA, 225 bp, Homo sapiens
ttttttttttttttaggaggagaaagaccatttatttctccacccacagtgggactgtgtaggttttgaaaagagcaatcgctggcatccctttaaatcttggctgactcccaccgtggcagccaatcagcagaggcggactggtcgagttgcctgggcacaggcccctggttggccgaagacaattagccaccccactgcccactcccaacgaaagggaaattg

SEQ ID NO: 1065 - DNA, 288 bp, Homo sapiens
tttcatgctttttatttttcggtttatttaatcttctttaacacagccattgttggttcaacaatccaatatttgaggttacattattgcaaaaataaggacatagctgaataggttatgccatcaatatgtttgttaatcctatcccttttattaaagacaaagcacagtttgttaatattgtcttggattaactctatttgtaaggttacttatagtggttcatactaaaggcaggggatttgcttcctgggccaattgtctttaaactataatttaagaaatcat

SEQ ID NO: 1066 - DNA, 464 bp, Homo sapiens
tttattggactgtaggtttttattaaaacaaacatttctcatagctctaagcaaagcattagaattcatcaagcggactcacatcttttctctgcacagagagggctgaaaagggagagaaagtcccttatgtatgtctagatttggtaaagcgaaggatttcagcgaatgagtcactgaggctatacacgtttgcaaattgtaaggcactggcgggcagagagcacagataaaggacttctggggtcccccatcctgtccagcaacctcccagctcacaccttagcttctaccaagaagggtgaacacagcatccctgctatcttcactcagaccccagaagacacaggaaaccgcacagctccactcccaccataacttattaggagataagtcacattttatcaacttgccatcgcgcctcctatagattatacttcggtaaacccaatctgtataaattc

SEQ ID NO: 1067 - DNA, 308 bp, Homo sapiens; identical to SEQ ID NO: 654

SEQ ID NO: 1068 - DNA, 308 bp, Homo sapiens; identical to SEQ ID NO: 654

SEQ ID NO: 1069 - DNA, 304 bp, Homo sapiens
agacaggaacacagtgtttattcaggcattttatttcctccattaaaaygtatcatttycctcataaggattttgcattttycccattgtttattcttagacagtatacagttccaagttttgctgmaaatgggattttcaaattacatttccaattggccaatgctatattctatatacagrtttbctatatagtacagattttcatggkgaactattaaacaaaactaccttttgtcatttctaatagttttycaactgtttctcttggatgtttgtctctacaatcacactgctcaaaata

SEQ ID NO: 1070 - DNA, 325 bp, Homo sapiens; identical to SEQ ID NO: 655

SEQ ID NO: 1071 - DNA, 212 bp, Homo sapiens
ctaacttttatctttattcggtggaattttccagcatgagctttttgactaccctacaggttcgattttgttgctttagagattggcagcatatcaatttgtcctgagaactgataataaagggaagtgaaatcaagcacttaccctgcctttcytgtacartgatgagggtattaagrgttaaaaacaggcacatatacaaatatttcatg

SEQ ID NO: 1072 - DNA, 308 bp, Homo sapiens
cttaattttttctcttcttttctttttctttttttttctgtactcatcagaatgggatactccacaactgtctcaccaactcagtgccagtacacatgctctagaggacttctggactcgcagctacaactgtacaagtgcacacaagtgaatctaccctgttatcctccacccactgattgaggatcgaattgcacatttctcttaaccatgacaggagaaagcaaacagtgaaacagaatcatgggtgatctttctcactttccctcttgttttcattggtttgtccataccattctaattatcat

SEQ ID NO: 1073 - DNA, 266 bp, Homo sapiens
aaagtcgtgagtttattgcatatgtaacaaaatgaacctgacctcctgggcccagcctgctgtacaatcactgtttgttttgtgtttccagctggttccataaccacattaaatagaactagtatttcattaaatacttttgattttgacatagaacattagtgtacaactttcacaaaataaatcagtgataaaaacagtgggaaggataacaaggatagcagcaatacttcaaaacaagacattacaaaataaattaaaaaata

SEQ ID NO: 1074 - DNA, 313 bp, Homo sapiens
  misc_feature (1)...(313): n=a,t,g or c
ccaactcagcagctctatttacataacagcgtcgcccacaccccgtggggcctctnacggcttcttggctttcttcacggaagatgagctggaggccgactcccgtcgctttctcgaattgggcgtgaggggtgcgcccaccacatcaatgatggtgtccttggggtcaggaccaagtccgggttcagtcactgccggctcagcagaggccgggcctgggcctgatgctggtgtggcagggccccctagcacaccagcccgggccagtgcctcatgacggtgccgcagcatctgcagctcatactcgcagttg

SEQ ID NO: 1075 - DNA, 229 bp, Homo sapiens; identical to SEQ ID NO: 659
  misc_feature (1)...(229): n=a,t,g or c

SEQ ID NO: 1076 - DNA, 294 bp, Homo sapiens; identical to SEQ ID NO: 661
  misc_feature (1)...(294): n=a,t,g or c

SEQ ID NO: 1077 - DNA, 256 bp, Homo sapiens
  misc_feature (1)...(256): n=a,t,g or c
ctccaacaatctggaatttnattccatccatatacatgcatagtaacaacatttgttgagaaattatttctatcagaagtagaacattatctttgtgatcaccaggtgcagtattgctactctnatatttaaatagatcttatatatganttaaattcatacttgcagcattgagtttagggtttcgatttagactgtgcctttcaaaagataaaactgattaatactacctcattacttacaatactgcttccag

SEQ ID NO: 1078 - DNA, 305 bp, Homo sapiens
  misc_feature (1)...(305): n=a,t,g or c
gctcagtgaagatttattgttatagaaggcaactaatacaatagatttgtgggctcgaaattttaaaaagttctaaaaaggcagttaaagcttgacaataaacttgagtaaggtttacacaatatcaaagtatattagttctttgaaatgaaaaggtatttttttnctncctttaacattgagatgtctgagatgtcaggattttgtagcattcttagaaacaacatccactgtgtgggatacttttttcccttctggagttttaaaccagtctgactctttggttgtgcctatacaatgaaaag

SEQ ID NO: 1079 - DNA, 243 bp, Homo sapiens
caattaaagtaatttattgtattcttccagatcagacataaagagcatcttgggaattgataccacaacacaatgttatacaccattttcacaaccaggcttgcattgaattcttttttaaagaacatagtaattttaaaaaatctaaatatttacatattaataaaacatatatacagaagattgagacattatccatagatatggattttttttttgctaaaaaagcctataaaaaggttt

SEQ ID NO: 1080 - DNA, 345 bp, Homo sapiens; identical to SEQ ID NO: 662

SEQ ID NO: 1081 - DNA, 325 bp, Homo sapiens; identical to SEQ ID NO: 663
  misc_feature (1)...(325): n=a,t,g or c

SEQ ID NO: 1082 - DNA, 440 bp, Homo sapiens
  misc_feature (1)...(440): n=a,t,g or c
gaccacatcactgctcagcnantcngccacggctgcctgaatggccccagctcggccctgcaggggagacgactgcatgccagtgacattgacatcgtggtaggcttcaagccaagcctcagtgcccagaaggtcatgttctgttaccaggaagacgatatctttggcccaataaatctgcccccggaagtgggcagccagtgccagcagcagccccacagcctgggctgttgggtagagtcagagccacagggcacgggtgaggcacaagcgccttcgtgccgaattcttgggccttgaggggcaaatttccctattaggtgagtcgtatttaaattcgtaatcatgttcataggntgttttcctgttgtggaaattgtttatnccgcttnacaattttccacaacaacattacggaggccggaaggcttaaagtgtta

SEQ ID NO: 1083 - DNA, 325 bp, Homo sapiens
  misc_feature (1)...(325): n=a,t,g or c
ttttttttgaatacataccatactttnntaaccaagacaattcagctgtttttccagagtatatttcaaacagagttggcatataacccgtatgtaacaatattgctgtgattttagtcatatttaagggtccaaaatatgttcacaaaagaacagtttgtgaatgtcaaccagtttttgctttatattccttcaaaaacattccaccctgggcatncacactaatctacatcactgaaaataaccaaaataattcacagtctcacctctatgtaaaaattctaattgactcaacagggaaaggactgccctgctccttttgagg

SEQ ID NO: 1084 - DNA, 188 bp, Homo sapiens
tttttttttgtatttcaagtttaaacattttatttacaaaaataggctgggaggaaaagggtttgcgcccccacattctctcctgggacctaacgattttgcgccattttctaatgttgttttctctaacaattttcaaagtcacatttggattccttcagaattgtatttgtcagctagcagctcgg

SEQ ID NO: 1085 - DNA, 350 bp, Homo sapiens; identical to SEQ ID NO: 668
  misc_feature (1)...(350): n=a,t,g or c

SEQ ID NO: 1086 - DNA, 475 bp, Homo sapiens
  misc_feature (1)...(475): n=a,t,g or c
ttttttttcagttgagcagacatttattaagcacctatcaagtgcaaggcntgttgctaggcgccgtgggaaatacagagaacacaggcggtccctgcccacgaggagctcacagtctagaaagggcagcaagacagtacacaatcagtggcagcagcaccagccagagtggcaagtgctcaaagcaagacacaaagtgctgtgcggttcacaacatcatggggatgcttctggcagaagcactggaaaggagacgaggactcaggctgggccttccagggagggaagccatttgggagaagggcatctctagcggagagaggtccatctgcagagcccacaggtcatgggaaacatgtggnctgcagggagagtttgggggacanttcaagtatggnctggggaggtngacagccacggacattaagttcaggagattttganctttntggtctggttcaaacagccactncag

SEQ ID NO: 1087 - DNA, 443 bp, Homo sapiens
  misc_feature (1)...(443): n=a,t,g or c
cagatatantatcaacactgaggtttaccagtacaaatacaatatcttgcctcaaaaggccttaaacagtacggaaatgtgttatctaaattaattaaaggttataaagtcaagttggctccagacatggnacaatgaggacatctggacagatataaaagagaactctgaacccctcatatcctcctaaacctttctaagaggcagtcctctcaaatccccaaccaagctgctctgcattaaacatttcaatgacttaacctgggggcaatggcctcacacaggtatgcagcttcttctcaggcaggccaccccctttcactgctctggaaccctccgggcccaggagttctcaggcataggcccctaggataggcaggtacaagggtctggattttaaggngataaccaaggcattttggttaattttcctagggggggtt

SEQ ID NO: 1088 - DNA, 384 bp, Homo sapiens; identical to SEQ ID NO: 673
  misc_feature (1)...(384): n=a,t,g or c

SEQ ID NO: 1089 - DNA, 332 bp, Homo sapiens
  misc_feature (1)...(332): n=a,t,g or c
nctatttttattcttttttcttgcttaatttagggtagtgttgggatagaagatacactttataaaaagcagaaagaccaatcattgagttattttagagacaatatgccagatccatacctttagatttaatcttacctttttttttagtttctcttcattcaagccgaggtagaaagccagtggtggaaagctgtggnattgcataggctacaaacattgtattgtcaacttgaaagtatagctacttctaaggatgttgatgttcattgtaggttttttatttataggtaggctaaaattaggaaggcaacttaaaggcttcccaaaaa

SEQ ID NO: 1090 - DNA, 398 bp, Homo sapiens
  misc_feature (1)...(398): n=a,t,g or c
cattgtcatatgtctctgtaatggggtggtgggacacatagtgtctaacacttcagtttctctgctgcttccctcccattgagaagccagtgacagggttgctgtgaagatgggagagcttctgaacccacctcattaaaggatgagaaacccagggtccgagagcaaagggacttgacggtggccgcaagtgcttcaaaggcagagctgggattggaacccagggtgtcatctcgatgggaatgtccagcagtgatgtccaagtgggaagtgaagacccgaaggctcaagggacacaggtggctgacagtggtcaaaggctagggggcaggattcaggcagaggagctcttaggggggttttttgccaccctgtntgaactcccgagactntaccag

SEQ ID NO: 1091 - DNA, 241 bp, Homo sapiens
gaaacaatctgggtattacaggaatctactttgtcaactgtaaatttatgaaatctaaatacagatcaagtatttctgatgaaaacgtatgaactgagatatgctgttaaatgtaaagtacacaggattttggaaatgtagtacaaaaagaatgtgaaaacccacaattttaaaatactgattacacactgatacaatattttagatacaatggggttaaataaaatatattaataaaaaa

SEQ ID NO: 1092 - DNA, 223 bp, Homo sapiens; identical to SEQ ID NO: 677
  misc_feature (1)...(223): n=a,t,g or c

SEQ ID NO: 1093 - DNA, 469 bp, Homo sapiens
  misc_feature (1)...(469): n=a,t,g or c
anaattcaaacttttatttggcaataagttcagagtcacataacacataaaatcaacatttaaaataaatagcaaattcacatctagaataaataggtctgcctaatttgcattaattgtgcctgatatcatacaggcacaatctgtcattccacgagataactggaaaagtctccaaagtcagagttcaaacctgcaggactgaaaacacacagaagcactgtcgcaggttgggttccccgaaagcagatactgaggtggagaatggcgtgcaggaaggttcataggacagtgctgtgggctgagccggctgggtacaggcttgtcagggagaggcactgggctgtaatgtggccacaatgaggtctcactggaccccacaaggggctctggagctgggatggccccagaggttttcccaagttggggtgaggaggccagacctttgtaccccatatggagccggtaa

SEQ ID NO: 1094 - DNA, 454 bp, Homo sapiens
  misc_feature (1)...(454): n=a,t,g or c
agacgggcttggtgacccggacccggactctgtgctcaggatcctcctctgtaggttggggtgatgggggaggctttttggggacaaccctctttttcttgtgcttcttcaccagctctggactctgtttttcctccagtcttttgatgagtttgttgagagtggatgtgagagccagcattgcccgatcccgctctgactccttcttcagcccatctgggtccagctctttctctgtctccgaacggagccggtctcggtctgacggaagcaggatcccttccagttccttctcaaattctcccagtaactgccgttcatcctcatcttcatcctcatcctcatcctcatcctcctcttcttccatctctctctggccgttctggatcaaccctttccttctncggggtncctctgaaggaattctggaaggaataatccaaagggtggtctt

SEQ ID NO: 1095 - DNA, 506 bp, Homo sapiens
  misc_feature (1)...(506): n=a,t,g or c
taacataaagcatttgtttattattgctatactcaaggcaaaatctcttaattagccttgataatggaagtataaccagaaccattattcatgaatttacattttgttcttttctgctgttgagacttcactgtttcacacacaccatctaccccaagacctttaatatacaagaacaagaagaattaacttgaaagtcacaaagcatggcttgaccacttgcctagttcctgactttaggccaatcacttcccctctctgaacctgtttcatcctgtgttaaaaaagaaatgggagaggaagaggagaggatagaataaacctacaactgagataacacaggtgataactgaaagaacatgaatgaaatttcactgtgaataaaaaatattatataanataaagtatcactaataacaaataggggttgtggagggtaaaacagtctatggttcctgggaagcctggcatgacagtagccaagatctaaatcctgggggcaggac

SEQ ID NO: 1096 - DNA, 396 bp, Homo sapiens
  misc_feature (1)...(396): n=a,t,g or c
catggtacaaaaatgtttatttaaattaaatatttgcaacaaattaatattgacaactgttccaaagtatgagttgttctttcaaaaaaacgaaacagtttagcttaatgtctgtgatactgttttatgagattattcatacatgctctggactgcgcatcagtcaatcatatcatcaacaatttactatttattaccaaatggcatataaagtaatagcataaagagtaatcataccttataagtgattttacaataggacatcttagaaggacaaaaaggatttatcaacaatacaaaacataagataaaaataataggagattatataanacatatttcatacaggaaataatatggctaaaatccaaaaaaccaaccaactggtctttcagc

SEQ ID NO: 1097 - DNA, 587 bp, Homo sapiens
  misc_feature (1)...(587): n=a,t,g or c
tcaaataatccatctaacagccatgagaccactcaagtatttgaggtcatcagctgcgtccatcaagacatgatattgaacatggacaccatctggtctgttggtctgtttttgttggcaaaggactccaaaaggatgcagttgtatgtgtttcagctgaaccacataccatagctcctctcccctcacaaaagggtttctctggggggagaaaagtaactgattatacctctcatgtctcaaactgaaattctgagaagcaaatggtcagttgagggccccattccagatctgccgggacgtcctcagatgtccagagctggcaaaaggtggagcaggcagcagctttgggcaccagcctgtctctttctgttctgataaggccacacacatggctttttgtgataagcttccagcccatgccactgaaataacgtttaagaacctggctgcatttcacagaaatagcgtaatgggaaatcattatgtaattaaacaaagcatgaagctcattatccttttccttttaacaaaccttcaatttcacattttagtggacactgtggnttccagagaatatatggatt

SEQ ID NO: 1098 - DNA, 446 bp, Homo sapiens; identical to SEQ ID NO: 681

SEQ ID NO: 1099 - DNA, 402 bp, Homo sapiens
ttcgacatataaccaaatgttatttaatatcttaaaaagtaacacaatccaaaatggatatttcacacaacactacataaacaacatgaacacagtatcaccatagggagggactttcaaatatagacttacaaaaatccctcgtccttttttttcttttaagttattatactaagcatgacaagtaatcatcatttacagtatggtacactgacacgataaaaaccatgttacaaatgtgctgttataaatcagtaacattagggaagacatttcatgaactgtaattatttcatatgaaatactatacaatataaacagaacatccatcttgggatgacctttacagcaaccagagaccaagtaatttaaaattttttttcagtgcaaacacattttatt

SEQ ID NO: 1100 - DNA, 438 bp, Homo sapiens; identical to SEQ ID NO: 683

SEQ ID NO: 1101 - DNA, 230 bp, Homo sapiens; identical to SEQ ID NO: 686

SEQ ID NO: 1102 - DNA, 335 bp, Homo sapiens
tttgaaattccaattgtaaatggttctctttgaaatactcagttttacataaatgcttatccagcagcacgtcataaaccacagggccaaaacaatttcttgtcacgtaaacatggcgttggtagctaaaactcaaatttagcaacaaataattgttttcataggactcataagataaccttaaattgttagatgcttttagggcattggctaattcagaattggctggtattataacagaacttaatttttgcaggcatttaaagattttcacgcattatgtacctgaaggttttgtctcttaattttctttgaaccacacctcttctccttat

SEQ ID NO: 1103 - DNA, 425 bp, Homo sapiens
catcataaaaaaccaaaagaaatttttatatctcaaattggtaaactttacaaaatatttaacatatgaggaagaggtatatcttacagaattatttggctatgtcataaggcagtaatgaagatggaatttttcctatcataaatctgacataagtgaaagtctataacatggtcattctccataaatctgaaagcttgttggttacagcaatatgatcatgccacactgtcgtcgttattgaactttgatgaaagtagactgaatgagaaaggaacaaatttggtgcctgcacaaccgtagaatttgttctgaaattctacccagtggaggcgtatggcgtgaagaaacgcagaaagcccttccatgatcagaaggatgaaaatggtcaaaactgcaaagagcgcgataaccgggagcagtag

SEQ ID NO: 1104 - DNA, 440 bp, Homo sapiens
  misc_feature (1)...(440): n=a,t,g or c
gtttattaaaccagatttattctccacaagctgaagatacctgaggttacatgaggactggcattaaataatttataaatgtatttttgactgacagacttttatcataaggattcatgtgtttacaaaagcaaaatccaacctctccagagctagaaagtgggaaggtgcccgggctgcaacacagccttgggggaggatgaggccacataattctctctgcccacactctcagaatgccccaagaagttagtagctacacaaagccaagccttgggggaaaacctggtccgtggtgtggactctccaaaatgcagacccaaccggangccgggcccgcctttccatctggaggcactgcagggcttctgaaagcggcccatcccaggagcctggcaaacacccccagagaccctcaggatgcgcagccccggggcttt

SEQ ID NO: 1105 - DNA, 276 bp, Homo sapiens
tttttttttttttttttttaagagtagttaaaatgtgtttattcatttacaaacccagtaacatgagaagaaactcagtggaaaccttgcttggtggagacagtgcacagtgttagtgccacattcacaggggcagaaatgctcggtcaccctgtgcacccaaagtcacccaggatctctagaaaagatcccacttactgaagtgcctcggatgtcttcagggccagattgtaactacacaggaacagggaagggctaagcttgaactgcacactg

SEQ ID NO: 1106 - DNA, 529 bp, Homo sapiens
  misc_feature (1)...(529): n=a,t,g or c
ttttttgactagaaagggagcactttaatgaacagaagtacagacgtgctggcaaggatggaaatctccactggttcctggcccccttcacctccatgcatccccagcatgggtgttaatcattacccaagctctcgctgttccccctcaccccctgcagagtccagcaggtctagatacgtgctctttgaaatgtgttctgggattaaaaatggtgccctgaggctgtctaaccctcacaaaagacagacacatgcacacacgggccttggggagggctgtgtattagcagtcaggtgggccctcctgggagagcttgctcaagaactcttctcggaaggaaacccaccttaaggtagggttctgataggcagantcccagagggacagccagctgctagaagatggggttatccagggtttgtaaggtttaaacaacgggcagggagncaaacgagtcaaatggtttcctcgtgcgaattttggctcgaggcaaattcctatagtgagngtattaaatcgtaacatg

SEQ ID NO: 1107 - DNA, 610 bp, Homo sapiens
  misc_feature (1)...(610): n=a,t,g or c
tccctttctccctgtttccctcccttctttccttccttccttccttccttccttcttagaattcactgaagtatttcctaggtagccttttacttactactttaatcaaagcttatctttgtgcccaatgtgtaaaaagtgaaaatgtctcttcgaaattctatattacaatatagacagagaagttgggccttgagggcttgagtttcacttaaatactatacacatgtggtatcacacaaggtggagggggagggaacaaacagaaacataacaattatttttattctgtctttacaaaagaaagcctcttctctatgaaaaagtctttttggcatctgctcccggaaacctgccccgagaacacgttccccattgctttgcaagcatctctttttaaaagcacancactgtccccgggagtcacgtaggttggattaanctgtcttagttgaccaacgaagaancactggatgagttttccagggatgantggttgtctggggtggaacatatagtcctgtctacaacaaatgtaactcctgatatgggacnatgaacncagtgtgtgacccaggagtgnttgatctgtnaacantcgcatgnaatt

SEQ ID NO: 1108 - DNA, 381 bp, Homo sapiens; identical to SEQ ID NO: 693
  misc_feature (1)...(381): n=a,t,g or c

SEQ ID NO: 1109 - DNA, 330 bp, Homo sapiens
  misc_feature (1)...(330): n=a,t,g or c
ttttaaagaatacggcacttttaataggcggcagccccaggnggtgcgtggacagaccctgtccacagcgcctggctcccgtgctgcctgtccttccatctggaatgccaaacagaagctcctctcaggtggcatctggggagtaggtcccagtcctgaaatatacaaagtggcgcctcccactgggcagtggtcactgggctgcacggtcctttcaagtcctagggtggcccctcaggtcactgcttggccttcttcacaatgggtgcccacagcagagatgacggtggtcttnggagccgctgggcttgggtgggtgaccgtgacaac

SEQ ID NO: 1110 - DNA, 350 bp, Homo sapiens
tgccttgttgcctaggctagtcttgaattcctgggctcaagagatcctcccatcttggcctcccaaattgttggtgttaaaagcgtcaaccaccacacctggcctgtcacttctttatcatgttaattttcatctaaaaaaactatcactgaaaacttttttaagtataatcaaatgagttcaactgtcacgttaaggatgccttgaattcttttgattttctagttccaatttctagctttaatatcttcaaatcaccctgcccaagtgggtgtgtgtttttacaccctctctgggccctttaggttttctgctggggggaacccaggaccggccaggcccaggcaccc

SEQ ID NO: 1111 - DNA, 258 bp, Homo sapiens
  misc_feature (1)...(258): n=a,t,g or c
ggaatttttattacaaaataaaacacaagcatgataaactaatgctggaatatatcattctaatttaactagagctaagcaaataaaatgcaaatgaactatgtaagnaacagcatgcagngaaacaagtntttaattcagtaacaagtctccatgcaaacgggaaaggttgctaaccntatttggcaaacactgcatcactatctacaaatggcctctattcatatcaagtagngctgacttgaactttttaacanc

SEQ ID NO: 1112 - DNA, 379 bp, Homo sapiens
  misc_feature (1)...(379): n=a,t,g or c
gaatttttctgttgtgttgctgtctttaataagtgaacatatgtttgcatttgcacaagtgtattaaactctaacatgcatattgacaagtgtacatataaggtcagagctcaaggaattttcataagctgaagacaccatgtaaactttacaaacattaaaaagaatcaaccagcaccccagtagccttcccttctattccctttttaatcacccaccccttccccaggggttatccctacctcctggacaaaaaggattggggttttgccctctctttggtactttaaataaatgggggatccataaattatgggggcctctttttgccatgggggcttcctttggactccaaanttatgggttncggggggactcc

SEQ ID NO: 1113 - DNA, 319 bp, Homo sapiens
ttttttttttaacaagtgactagtgtttaatctcagaaacatttgcattcagagtacgttcccttagaattttctcctctccactccatgaggagtgggcatgtgctttattatatcaacaagactaagaagccgcacccgagtggtcccactcaaaaaagagatttctgtttctacctcaaaatgcagaaaccactacagattaaaagagaaacacacacagacactttgagaaactcgcccttcctcatcttcaaagtgtgggggtatgcattccagatctctcagcctgatgggacagcttgggaagtgggaaggg

SEQ ID NO: 1114 - DNA, 334 bp, Homo sapiens
  misc_feature (1)...(334): n=a,t,g or c
ttttttttttaagtatatcaacaaagtgaaagatgggtttaatttttcccacaaaaagttaaaagaaataacagcagttttagaggaaganggaaaaaataataagaaaattacatgcagttgcaaaatgtgtgactatttacaaactctaacatataactacaaaacggaccagaagaatcattatcataggaagcaaagggtcatttcaaaantcagaggagggatgattcatatttaatttaattctgtgggaaaacatttaagtaacctttgaggacaaaantaggtgatatgttgaaatgcgggaaaccacagtgggaagggaaaaaga

SEQ ID NO: 1115 - DNA, 496 bp, Homo sapiens
  misc_feature (1)...(496): n=a,t,g or c
tttttttttttttttctttattaataaattttatttttagcacaatcatttacccaaaaagagagtttgagaatgttcgagaatctctaccactcggtaaccatgctggctgttatatcagaaaaatccataaacatacacagcagcgagctgttttcacaagacttcctgctaataaacacaacactttctcctccactcagatgggagcctcagnatgccaaaacggcaggatgtgccaactaactatagggctcgttgctaaggcaggaggaaatctattcaagtttgtccaggcaaattcgattgtacagtggggatgggcgtctgcttctgcgggccttgggacaggggaggccactgggtctntgctggctgttcccctgtagggcagggtcgangctgggtnggccctttaggagggcaagggttaaaatgggtttntcatgggggtttaggaacataaggggntttttgaggnaaaaattgncaaatt

SEQ ID NO: 1116 - DNA, 467 bp, Homo sapiens
  misc_feature (1)...(467): n=a,t,g or c
tttttttttttttttttttttttttttttttatgtgtttatactcaattcataaatggactgtcttacaataaaggngataaaaaatctctgttccnttctttttgcttttcacacttttttnccccataaaaacccactgcagtcatagtcagtagttaggggtgggggttggttcaacacattctgggtgctcactcatgaacatgccaaagctatactgcaacactagcctgaattcaacttagagttacctcaccatcaaaatcaggtggctgggacgttcttttgtctctgaagaccaaaacttgaaaatggactgactttagtggggaaatttccttctgcgacagtcattgtcatgggaactttcctggggctggggagttctgttcagccaaattcagtctgggcagcaccggggagcaaattcaattcatgggtttgtccaaaagagtcctaantttt

SEQ ID NO: 1117 - DNA, 377 bp, Homo sapiens; identical to SEQ ID NO: 699

SEQ ID NO: 1118 - DNA, 439 bp, Homo sapiens
  misc_feature (1)...(439): n=a,t,g or c
tttttttttttttgtgcttagccaagatttattgaactggatgaatgaatcaatggcttgtggaggggtggggagtgggggggcagtgagagaccacacagcacacagaatgtctaactaacttgaggaattccagttgctgaggaggatgtaagcagattgtttcagagatggataaggaaagagatgactgggacagggtaggaatcatggctattcatgggtactcattctatcctctcagtcaccctccacatccaataatcagtcattaagttatcatcttaccttaacagttcacaccttaacacctccaatctattcctactgggcctttgccctaggtgcagggcctcctggggtctttttttccagtctcctaggctaatcttgttcatcttccatttcggntctcttcacaaatgggattcactcangg

SEQ ID NO: 1119 - DNA, 426 bp, Homo sapiens; identical to SEQ ID NO: 700

SEQ ID NO: 1120 - DNA, 465 bp, Homo sapiens
  misc_feature (1)...(465): n=a,t,g or c
ttttttttttttattaagcaacatgtttattggcgttgatgcagagacttacacaagtcttcttttttaagagaaaaattacaaggtattcaagttacgatttttagataatctctacatttgagacatcaaattataaaaggtcagtgttaccccatatgacatttgttttaaaagtttaaaggttaccagggtttgcagcttttaaagatatgaatgtcctgggccttacccctttgggtgtctgagctagcagctgcagagagggccctctggaatacacagtatattttgctatcccttcaagttatttaaatacccggaaacacaaaggggttttcccttagggnattgtgttgattgggggctncaggggntttaaacccggaccaaccntcggtcttggggggggattgtnttttcaacgnggccatcttcttgaggncccccttctactntccgggg

SEQ ID NO: 1121 - DNA, 399 bp, Homo sapiens
tttttttttttttttttacgcttttactggttggtttaatgagagagaaccacttttggccattatcaccttacgttactacaaatcctgaaaggaaagcagctttgagtcttgggctcggctgaaccccctgcatggaccggggctaacagtaccctctacgactcccacaggtctctctttgtgtccagatggatggcgactgtgagtcagcaacgccagccaaggacttcctcgcctttaccgtgggcattggggcagtttttcaggctctctacagagaggaggaagtggggccagtaaggggagaggggctagagagaggacaccagtttacataggggttgactttcacttgtgtgtagtagcagtttcaggaattttaaaaagaaattttcc

SEQ ID NO: 1122 - DNA, 314 bp, Homo sapiens
  misc_feature (1)...(314): n=a,t,g or c
ttttttttttttttttttttttttttttttttatanacagccgtctttttattttatcacaataggcaacaagatgggnctggttttggaatatgttaccatttgtgtttaatttccaaagacacgcatattagctcaactagtgtaaacctgtgaaaaaatagctgagccatctttttcctctcctctgttaatttatcttgaaatgttcacagcttaggaaactacagcctgctggggnaagagaggggagtgggcccccatggggaaaatgtcccagnctcgctggaaatagcctcaccccagnaggggtt

SEQ ID NO: 1123 - DNA, 444 bp, Homo sapiens
  misc_feature (1)...(444): n=a,t,g or c
taataaaaatttattganttacaagtgattatttatcaaaagaccattaatagcaggtactgaaatgatgtgttactgggtggtgctgggagactaataggaaatcaatgcagctggccggccagaatgcatatgagaagcccaccccccggcagccagcgcaatcacccccgcaacacacgccaggngccacccctggcgcaatgaaaagttccccctttttatttatcgtttacaaatgaaataatcaatacttttaatctagagcaaaatttattaactttcccatcggagagagacatnttgactgggggagagagtggggtntgcgtgctgtagnaagatgggatggctgcgtggccatatcctaacctgtccgcgaggcagttgcacctgcaggctgncctttccagnctacgggccggggccacngggggcaagttg

SEQ ID NO: 1124 - DNA, 212 bp, Homo sapiens
tttttttttttttttttttatattattttatattttattcaattttaatatggtttccattattaacttttaaaacaaaatgatttccagtttaaaaaacaatgcactgaccacataattccttttttattttacacagttatacaaatattctaaatacacattttgtgttcaagatgatggcaaatagggattaactgtacagtacatag

SEQ ID NO: 1125 - DNA, 424 bp, Homo sapiens; identical to SEQ ID NO: 702
  misc_feature (1)...(424): n=a,t,g or c

SEQ ID NO: 1126 - DNA, 397 bp, Homo sapiens
tttttttttttaatgatgttcatttatttaaacgatctgtatgaatttggtgattttgtggatacgcccctgacagacaaggattcacagccgacggaagtcagggaggctccctgcaaattcttcatctccgcggggcctgcccgagccctgatcctgcagagccgtggggctgaggtagccgccggttgtggtccagggagtgcgtctttctggatgcggggcaccttcatttcaccgtagcaaccgggtaccaaaagtagaagcggatttttggaaaatgagtcattaggtcccaaagagaacctattgcaacatgggactccataacgttcttgaggatcatcctgaggaaactgatgttctctcgttagacaaaaatggcacgattttgctt

SEQ ID NO: 1127 - DNA, 413 bp, Homo sapiens; identical to SEQ ID NO: 705

SEQ ID NO: 1128 - DNA, 340 bp, Homo sapiens
  misc_feature (1)...(340): n=a,t,g or c
ggtttcctttttggtttattcttggattgggcctaatttattttttatatttcaaaaatctttcattaataattattccattagggtttagtaactacagactcatttactaatgatttactatgataccctaaaaatagagaaaaaaccctagaatatgagcgtatgcaagtaagtgcaatttaatatatgaattgcagaaaaattttaaacaagctttaaaaatatctctaaaaggaggcttaaagttaattgctgtagcctcctgtcatccacagagaagncaaaattttaaaaacatcaaacatactcaaaaacagggcaaggctggganagggta

SEQ ID NO: 1129 - DNA, 333 bp, Homo sapiens
  misc_feature (1)...(333): n=a,t,g or c
nacattgtatttattttcatgttttaccttctattgatggcaaatgagactggttttccatttacagaagtgatacaaaagattcctgttgcaataatttcattaagtgaataatgagccaatttaaagaaaaatataaagcaaataattntacagatggnaaactaatatggcaaaatcactaatattcaaggctgaagtttggccgggcatggtggctcatggctgtaatcccaacactctgagagatggggatgagtgggctctctcgagcccagggntttaaagaccagcctggggcaacataggcaagaccctgtntctaaaaaaaaa

SEQ ID NO: 1130 - DNA, 449 bp, Homo sapiens
  misc_feature (1)...(449): n=a,t,g or c
ttttttttcccatcttaaaacagtgnaaacaggtaacttatgcttttaaaacaccacgaccccttccccaccccccaaagtccctttcctcctagtatctgggggaaaatctgcaattctgcaaatgttactgcgctagaggttgcaagcagcggagaactggctgaacttggcaaaaggcaaggactggtcaaagcttcccctttctcctccttaaacatctaagtgctttccagtctgtcccttggttggccttgttctcctgccagagggaagggggttcatcatgcccttcttgcatatccttggggttgcttccatccctgtttgatgtctccctcatgtctgggaagctatataactagttacaggatggtagtgattaacccacttattctggctagatctctagtaaaagcataatttttaaggttaaggagcagtttagg

SEQ ID NO: 1131 - DNA, 398 bp, Homo sapiens; identical to SEQ ID NO: 707
  misc_feature (1)...(398): n=a,t,g or c

SEQ ID NO: 1132 - DNA, 446 bp, Homo sapiens
  misc_feature (1)...(446): n=a,t,g or c
agcaaaagacattttttattgagaagtgaggaaacacacagatcagagaagcaggttctaaagggatcgtatccacagttattcttgtaatcaattagccagaatgaatggatgttctcaacagaattctgggacaagaatgaatgagttcccacattttctggttcatgtacaaatgaattacagactcaaaattctgaaaaagagattaccattatccaacaatgggtaaaatgctcacctgtagctagtggaacggatacctgaaagacactaccacaggaagcaccccagagaggggaggtatttctccagagaaaacaggggtgctcatgtcaatcaatggacaacaggcatgggaactgcaaaatataataaacgttcattataatgagttcttcttaagcgggccccctgtnattaaatgccagttctgcttatngaaa

SEQ ID NO: 1133 - DNA, 357 bp, Homo sapiens; identical to SEQ ID NO: 708
  misc_feature (1)...(357): n=a,t,g or c

SEQ ID NO: 1134 - DNA, 410 bp, Homo sapiens
tttttttttaacaagcatggatagtattcttatgtaaaggtagtatcaatgagaaagagctggaagacagacctagctgtctgtcaggtagaatgagggtgaaggagatctaggatgcttcaggcattgcgcttgaacttaaaaaacaggatcagcaggccctgacttcataaggcccataaatacaaatgactagctccctttctcaaggtcattgaaaatatacagtagtttcagacatcacatgggtttgggcaaagggggcagatttccaagctaggtcacttaatggtatctcttgcctcaaaatagtcccatcaacactaatttaaattatttccacttttgttttaaagcttaaggttctactcactggacattaatttgaggctaacagcaatgtgttttgc

SEQ ID NO: 1135 - DNA, 424 bp, Homo sapiens
tttttttttttaatgcaccaataaatgtttatttataaataatagaagtgtacaattgtacaatatattatgtacattataaaacacacaaaaatagaaatttaaaaggatgagattaaatacaaataatcatcttaatacttcctcaatggattgatcatctccacgcccctgggatgtatacacccccacctgaaacaatagccctaaagtatgtcaatgattgttatttgggttttcagctcaggttacagaaatatgtacaagatcgcatctttttaagttttgcaaaatagccctagcatccaagtttaaatgggatgaggaatgcttgggtgctaacttcttgaggacatatttgggactaatccactacacagctgggtaaaatgtcgttatgggttccaccaacagttattttcca

SEQ ID NO: 1136 - DNA, 340 bp, Homo sapiens
atctcagacaaacattatgtatctttatttaaatttgcaaatgaaaacaacacatatttcatgttagttttaataagagattccctatcctctgccccagtaaaacctaaccaagccagcctgacaggttatatcaatacagggagctggagtgggagccaagggtggtgttagataggggtggggtacagatcaagggggcctgggagactcagtgactggaagtctctgcccctcactcttgggtgagtagctaatttcagcagctggcttcataaggaggagtcaggggtgggtggaggctcctcccaattccagatccacttcctcttctccttct

SEQ ID NO: 1137 - DNA, 416 bp, Homo sapiens
  misc_feature (1)...(416): n=a,t,g or c
ancntttannnnttccaagtcattagctttatttttactgaattcagcatgggatgacaaaaatgcattatatcactaccatccattattacatgtagacatttatccttgtattctttatatgtccattttctacgttaaatctgttaaccaatactaattnaaattacatgatttcctactaaaaatatgcagttcatataagcaagggcaaataaatcctccttaaaacattttattcctttataattgaggaacttaacagtcttaatgggctaggttcttaaaaaatgtttatagggnttaaggtttatttaaggggaggccggncaaacaaaacatattgtaaaactaggtattttcccggaggccatttcccttctcttcccttcttcccggcaaacngggggttttta

SEQ ID NO: 1138 - DNA, 347 bp, Homo sapiens; identical to SEQ ID NO: 709
  misc_feature (1)...(347): n=a,t,g or c

SEQ ID NO: 1139 - DNA, 367 bp, Homo sapiens
  misc_feature (1)...(367): n=a,t,g or c
caggaggtaggaggagattcttaaatctctgaagagttctgggctggggttctgggaggcaaggggctggaaaatttgggccactgattggtcagggtaagggagattgaatcattaggatatggaaattgcattctttgatgatttagcttctggtagggtccttcagaccagctgacatcagtagtttcatcagtatgcaggacctgaaagantntctcgaagggaaaacttagcatttcataatgttcaagctgttatctntagaggcagttaaggggaactataatcttntaacagactccacataattctgaaggcaatagccnaacaactttgagggaggggtcagccagcaaagtgaccc

SEQ ID NO: 1140 - DNA, 260 bp, Homo sapiens
  misc_feature (1)...(260): n=a,t,g or c
tcccacacatattccaaatcttttaggggagtaaaagcagtgaaaataacaaaattatgttccacatgcccaagtcacaaaatgtattaaatatgataaagtagcggctgtacaaaattggacaaattgacaaataacaatgggtcaggaacactgtatctgtttgatacaggagtgatattgaaaangggttctgtttttactttctcttatttgtcatcaaaaangaaaattgcatcttccataaacaggattccagg

SEQ ID NO: 1141 - DNA, 192 bp, Homo sapiens
  misc_feature (1)...(192): n=a,t,g or c
ttgtttaatgaaacacagtataagaaactagaaaatattacagngaactatgcatactgatgctaagttctgttttatttcatatacatgtccattttatatcacaaaccagtaaaaacatacaaattgataaatgtataancacattgcacatnggggtatacatgtgttatgttgggtcataatgtatat

SEQ ID NO: 1142 - DNA, 353 bp, Homo sapiens
taaaatgatcttacaatgtcaacatcaatgttaataaaaatatataataggctgaattcatcaatgatagaataagttgtaattcacttggaggttccatctttcaaagtaagcctttcatagataaatgaaaatcctttattttgtagaattttaaagattgttaaaggctgggtcaaggcaaagccacctctattagaaggggaaagaaaagcaagatgaaacaaaatatgttatcatacatatcgcgtgtgctatgagcatctttctactcctgccagattgaaaattctaggtttcaacattcttcaggatttaacaagtcaaaataaaagccggaattcaaatctagg

SEQ ID NO: 1143 - DNA, 328 bp, Homo sapiens
  misc_feature (1)...(328): n=a,t,g or c
ttataaaccaccatttggagggcttatgagcaatgtaagtccacctcatctaattaaaccacattgttttaaaagcttgaacagttttcatgcctataagacttgtctgaataataaactgctagagccagaattctgagtgtctttggagagccagggnttttatctgctgagcgcaaggggccagggcactcaaagagttaaagagtgttcccgcattgctgggtagggttaatatcacagctgcctgggnaaaggcattatccccgtacctcactttaacaaaagcctccttttggcaaacagactcccactttccccgcaaggt

SEQ ID NO: 1144 - DNA, 355 bp, Homo sapiens
  misc_feature (1)...(355): n=a,t,g or c
gctaattaatagctttttattttctcattgtaatatttttgagctccaaattattacaggaaaattatgccctaaactccaacttttctcctatcttttttcggatgttctgacacaatgacaaactgaggcaagacattaagcactatatcatctgccagtctgtttataggngtaccctcaattcttgaatgttctaacttctaggcagcagantaacaaaagggcaaccctggggcttgggcaggcttcaaacagggaaggaaaggcaaggggctaaggtacccaggccaggcataggctcagggctntggaaagggcaagggcatgctaggggaaaaaggggagaagntgg

SEQ ID NO: 1145 - DNA, 220 bp, Homo sapiens
  misc_feature (1)...(220): n=a,t,g or c
gtagttgtaaaacagatttcattgtgttatacatcacttcataaagtaagcatagttcccattcttccacatgatgctttttgcagcattgtaccacagaataatgactccctaataactcagctgaaaaatatttagatctacttgctctaagnntaaggncaacattaaacattctcagatgaaaagcttgctggatgaaatagtgcaccatcagaat

SEQ ID NO: 1146 - DNA, 319 bp, Homo sapiens
tttcacagatacatatatatacttttaataggaaattagtgctcaatactctgccctttgtgtgggggaaaacattcttttatacaaggatttttacctagctattacaatagtttaaggtaatgtacaatatatatttgacacagagagtgttattagatgttcgcactgcataaaatgaatcctctagcctttgatgtcttaaaaagaagttttacaactattagtgaagctaaggcactacatattttccttccacaatatggatttgtgtcatttaaactgaagaagttggatctttgtggtgatgacagggtat

SEQ ID NO: 1147 - DNA, 299 bp, Homo sapiens
tttatagaggagactgaaaaagataatttattccatcagaggcatcacaattacagattacagacatttgcaagtaaataatatgcagggttagagcgctgcgttttaacatttaacattcatgagtaaacagagatggccggtgggtaaatatcttgccaaggtggttccttgtattaagccttttgagtctaagatgacaaatccctaggggtcaggtggtttttcccgcacgaactcttgtcaatgagaaatccctcagccccttttgtcttgggtctcacagctccagaaggtga

SEQ ID NO: 1148 - DNA, 362 bp, Homo sapiens
ctcctgggtgacctgtctgaccatggctggagaatcagcacagcactcccctagcctcacctcttcccccatttggctgtggaaatggagaaacacagtcacctctgaacttctaaacctagaaacagaaggagactgtacacaggggaatacagaaggcagtctgggatgatgtcactatagaatgactgatgaaaaatgcagattgactgttctgacgctggcttagggcctggggctgaagctggggaccttgagcaaggccctttgactcctgtgatctgtttgccatgttgccaatgaggaataggaacctgcttcaaggatcttatgaggaccaggggagggaggggtatggaaag

SEQ ID NO: 1149 - DNA, 342 bp, Homo sapiens
tcaatttctgtgcaaactacttttatttataaggaaagtttctctattttgtttataaacattaaaccagagctgtgtgaaggcacttaattggggagaggtggggcagggatcctggtagagaccaatgtttcccacccagaccccaagactgctgggagagatggtgtcagcagtgactcccaggaatatccagtggtgtggtggcccatcccaggcccggctgggagtatggctggcttgctgggggatgtgatgatggtggtaggcatgggaggcactttggacgggatctgatttggcaaaaggaagtggtttcctgtccccagtgatttccagccc

SEQ ID NO: 1150 - DNA, 415 bp, Homo sapiens; identical to SEQ ID NO: 716
  misc_feature (1)...(415): n=a,t,g or c

SEQ ID NO: 1151 - DNA, 460 bp, Homo sapiens
  misc_feature (1)...(460): n=a,t,g or c
acattcatcttttattcttttcttatgaattatggggggtttcttggtacccatcttttaaaggactccactccatttttctgcgtcttcaatctgttatttcctgcttccattgccttctgaaatgtaacagttgcacttttcagctgaaaatcatctttttcaatctcagaggatgcctttttcaggtatacaataaataccccctcgaatcttaatgggcacacaaattggagatttttctaaagatttctgttgattctgggtagggaagtttgtctcaaggggaaacatttgtgttgattcctttatgaggaactgctgaggtcttttcacagggcccatgggttttcctcccttctcttattctatatttgtcccatccctgaggggttgaggagggggagccctgtntcccaatcttccaggggcccaggatgatggggagtggggagaggga

SEQ ID NO: 1152 - DNA, 298 bp, Homo sapiens; identical to SEQ ID NO: 719
  misc_feature (1)...(298): n=a,t,g or c

SEQ ID NO: 1153 - DNA, 436 bp, Homo sapiens
  misc_feature (1)...(436): n=a,t,g or c
ttangtattttgaatagcatttgatttatttttttctcttgtttgagacaggttctcactctgtcatccaggctgagagcagtgtctcagccatatctcactgaagcctcgatctctcggacttaagtgatcttcccacttcagcgtctggagtagcatgtgcatgccgccttgttcagctaactttttcacttttttgtagagatgggatcttgctatgttgcccagggctgggtctcaaactcctagggctcaaggtaatcctcccgcctcagcctcccgaaggtgctagggattacagggcgtgaacccaacacatctgggccagtattttatttgtttaacaggcaattctgggggatcttccccattatggctggggggagncttcttggtcccatggaattccnggcatgcactgggggggttccntggg

SEQ ID NO: 1154 - DNA, 552 bp, Homo sapiens; identical to SEQ ID NO: 723
  misc_feature (1)...(552): n=a,t,g or c

SEQ ID NO: 1155 - DNA, 472 bp, Homo sapiens
  misc_feature (1)...(472): n=a,t,g or c
tttattgacatgatgcaaatatctttattcgtacaaataacattcaagcatatcattcagtgttgcaataagttaagataagctcctttcagagatgctgggaaaggctggcttttgctccaaaacattgctccctaattttggctccttctatacatttccactaaaagccttgcccggagcaagaaggaagcttaccctgcccacccctcattgcccctgggtcctgttcccctttccaatgctagcagtaggggcaagaggggaggtttattttcaacgtgaaactttaactatatttaattccttctaccaaagcctgcattaagggctaaatggcatttacaaaacattacatacccgcaaactgttgaggataggtgaggcattgtttttaggctatttcatctctttnggtcaaaaaaatatatatagggcctggaaaccttcacttaggtgggcggattttact

SEQ ID NO: 1156 - DNA, 495 bp, Homo sapiens; identical to SEQ ID NO: 725
  misc_feature (1)...(495): n=a,t,g or c

SEQ ID NO: 1157 - DNA, 252 bp, Homo sapiens
  misc_feature (1)...(252): n=a,t,g or c
ttntttttttcaccaattacaaaaaggctttattatattttgccaaatgttaatcgctttcattatgtctccaaacattatttcaccactcatttttataacaagtgcagtgaagatatgcttatcgaatattgtacaatactgttgtgttctgtaacactctttcgggaacagcttagatgtaggtaacaagagatgccngcgtatgaaagngcttcataaactgtactgtataaatgtaaactactaccc

SEQ ID NO: 1158 - DNA, 422 bp, Homo sapiens; identical to SEQ ID NO: 727

SEQ ID NO: 1159 - DNA, 397 bp, Homo sapiens
  misc_feature (1)...(397): n=a,t,g or c
tctttattggaaggaaatgtgttaaagacagactcactacagtgttgagacagtagtgagtagcacagtaaggagactgcccaggacttgaggtccttggtccctctatagaagtatcaagtgtttgtaaaaggtttagcacccatgtgacagaaagaagccatcatcctcttaatttctcttgggttttacttaatatatagaagggcaaactagtggggcctctgagtgcaagatgagggacttcattaggaataaagncatattgcctctggggnttttctaacccataggctccaaggagccctcaggtgtcaggaacataggggtaagggggacttggatttactgaggaggaccccctacccctaccaacatcctgtggggacaataggag

SEQ ID NO: 1160 - DNA, 434 bp, Homo sapiens; identical to SEQ ID NO: 730
  misc_feature (1)...(434): n=a,t,g or c

SEQ ID NO: 1161 - DNA, 387 bp, Homo sapiens
taaatgacccaagatataattctgattgtggtctggatcataaacccgcatcacattttaaatgtctattgtcttggagacaataagctgttttatgggggaatgggtgggtggaaaaatgggagcagggcttctgaagctgactaatacctgaagaatacggcaacgtgagaaagcactgacccggctgctttggtaaatggaagaaaatcatctcagggttgctaggaacatgggtaagaccagactgtagaaagatccttcaaaacaaaacagtttgccattcctttaacaattactaaccgtcaagaactttggaattgtgccacggaagacagagcttaagatggggtggagccctttacctcccacttgctcccctgggcc

SEQ ID NO: 1162 - DNA, 471 bp, Homo sapiens
ttagagttgtgagtgaattgcatttttatttacgtttaagagtctctctccctccttgtgttctagtctgtgaatggctcacacttggacttagtgtaggctcctatgggaggagcgggcggtagtgagaatcttcatcaaatggagtaacatgacccaaatctctagaggtttcataattttgctcttgcttctaaaaacataatcatctcttatggggtgttatgtgctttgtatcctgaaattttccacttgctgcttcttggtgtgaggcgagaaatgccaccacgtgaacttgcaggaggagactggtggaagccacagggctaggccttcacttcccagtgacactgttcccaattccctccaggataagctgagactcctccaggatgtggttctgcagcagatgaggtgcgaacaaagcctgctctggcctgggcacccaggatggcactgagttctaaaagg

SEQ ID NO: 1163 - DNA, 419 bp, Homo sapiens
  misc_feature (1)...(419): n=a,t,g or c
tttttttttttttacaaaaagcaacaagagtttaattctctttttacatggccacaggtctcttcagtcaggggaacttcagctggtgcctctctcttgcagctatgaggcgacagtgtggtgacatgcctcatacagactgtcccagtaagccaggacaagtcaccattaaaatcttgcatgaacagccctgggcacgtgggaatgttaagaaagagccaccgcctccttagtcagcttaaccacagctccaaacgcagtttgtcccagctggcaaacgcctcaaacaccaatcatgcgtcgtgctcctattctgggttctttataaaacacttttatatagcgntatagatagcacagtaaatgtgcttctgatgcactctaacatagaggacaggaatacacactgtggggcgcgc

SEQ ID NO: 1164 - DNA, 385 bp, Homo sapiens
  misc_feature (1)...(385): n=a,t,g or c
caatcatcacatctgtgtattgtctcagggtcaatttttcagtaagaattccagacatttctcttcgttcacattacagtaaactatttttcaatacatttcctccttgactttcaaggcttgaaagtcaaagactttcctttcactagatctcataagtcataactgctctcaaccagatgcaggagtaattttgtataaaagaacaagctttttaaagtccaataactgtatctttgggggaaggttaaaagaatgtttaaatacaaaaaagaaagtaaaaaaaaaaagagagagagacaaataactctcctcctagaaaaaaagggcctggggagccctgggctagggcnggccaggggagggaaagccataaatagggggg

SEQ ID NO: 1165 - DNA, 498 bp, Homo sapiens
  misc_feature (1)...(498): n=a,t,g or c
ccctccacaacggaggattcataagagcaggggccctgtttgttttgttcatgctatatccccagacctggcaccaattaggtgacaatacatatttgttgaatgaatgaatgagaatggtagtcttttggttcccaggtttattgacaattactcatctatttttgactccccgagtcccagctcccaaactcgctctccctactccaggcttcacggtagtcccagaatgtaggaagtgggacaggatagactttaacatcacccaggcctctggtttccaaagcattttttttctttaatgcagtaaaaccattcctttaaaacccaaaatctctcatgggaacccctacgtatcaaatatataaagcaggagctgcccttgttcagggataatatgtggggcttatggctctaagaaacacagtttgacattcactgctctccttacttcagttacctcatggtatagataaatggggctgggccngaagaggg

SEQ ID NO: 1166 - DNA, 265 bp, Homo sapiens
gttttttaacattttaatttcaacgtgccagcatttgtccaaatgagatgatacaggctagaatgcacggcggaattccagactggactcactccataagccaactcatcactgcccgtgaacatgaattctggtcctcagagaagctgacattgtttccctgaacattcccgtggtctccctctgaaagccgatgaccatccaaccctgactcacctgaaatatcctacgagcatcgccctccgagactgacgattattaacca

SEQ ID NO: 1167 - DNA, 434 bp, Homo sapiens
aatcaaagtaaatttatttctgaattacataaggatcatgaaacagaaacattaactctcatgttataaaaacagtagtaaaatacagtacacaggaatgtcaattgaatgacaacaatgaaagtacaatagcaaatgaaaaatagtaacttttaactttaaatacaaagtgaagcaatttaatatgaaattttgttaataagaaaaatatatgtcccatgtctttattacatactgtacaaaataaaatattgcacctttcatataataaatatatacaaagagtatgttacaaatcgatctttcttttaatttaataaccttcaacaatcagatgtgattggatgattaacaactaatcgggctgggtgtgtcctcctcactgtcccccatccattcccaatcaccaaaccctccacatacagtagtgctca

SEQ ID NO: 1168 - DNA, 405 bp, Homo sapiens
  misc_feature (1)...(405): n=a,t,g or c
cttccaccagacattaattttaatgaggttactcaagatttcccctttcttcaagcattccaggaatcagatggaggaagatagggtaacatcatctttatcaaatatttgcaaacattatatagatagctggaaaagcctgtgcatggtcgaatggaagagatgtcacataaaaccgaataactgagtctcataatatttaggtcttgaatgaagttaggccttgatctgcttccagccagttgatctcttaattatgtaggctgtgcaacaangtttttggttctgttttatagttttcttctctcgcattcctctagatttaatatattccctgatttgggtttacagatcactgcttttcctccagaataagccaatgtggataagggagaccaaagggaa

SEQ ID NO: 1169 - DNA, 421 bp, Homo sapiens
attctatatagatatatttattattatttctcaatttaagcaccattcaattcttctggatccattctggctggaaaatatccctaaatccacaggatgttatctatttaatggcacatgttaactgaaaatgaggtggattttttttttaagaaaagaccttaaattaatttctatctacatcttaattggtttgtcttctgagccagctcacaatgtcaatgcaatttctagtgcaggtgtctctgagtgccccttgaccacaccccgaggattgtggcagtgtcctggccatgtgtcggaaggatcgaagggcagcaggtgcagccttgctctgcacatgggacagcagctgggctggtccaccgccacgcaccttcagcagtgtacctccggcacaagttccaccattctgcttcaa

SEQ ID NO: 1170 - DNA, 206 bp, Homoomo sapiens
atagttgtgtgcaatttaatgaacacaattaattttaccaccattttacataaaaggaaactgaagtgcatttcttagggtcccactgtaagttgagggcttgagattccaagaaaagtcttatttcagagctcagtgtcttgcccaaaacgcagcctcactgctcaatcacattcttgaggtttgattggctgaaacgcacgtgg

SEQ ID NO: 1171 - DNA, 286 bp, Homo sapiens; identical to SEQ ID NO: 738
  misc_feature (1)...(286): n=a,t,g or c

SEQ ID NO: 1172 - DNA, 284 bp, Homo sapiens
cccgattctttccttttatttgccaatttttatgagtcagtgccttacaacttccaaaggtaaacatgaggcttctttccttaagcatcatcatgaactcttagatgttcatttattcaacacaaactaaaaaaggaatgttaagtcttaagatatcattaatactaacttgcattacttgtttatgaaggattaatatactaaatagaatatatgctcacatttttatatgtagatattaatttacaagtaattaacatgctaaaacattttataattcgctt

SEQ ID NO: 1173 - DNA, 348 bp, Homo sapiens
caatgctggcgtgccattcattgaactttgacctaattaatcatctggaaacctgttacaatctttaattgatagcactgtggtaagttaatgtataagtttctaaatcaatcacaaaccaaacagcagcggttccttaaaccatgtttaaccagaagggaggggacataatctgattatgcatgacaagaaaacaaaccccatttgtagaataaaatactttaaatggtttaatattgtaaaccagcccccctcccacacacactttttaataatgggttaaacttttccctttctgtaaggccatagctggttttctgactagttgcctaaacatgtttctcatat

SEQ ID NO: 1174 - DNA, 313 bp, Homo sapiens
acacagaaaaaaaaaatttaatattcaacatgcaaaacaacctttaaaagaaacatgaaatcataaagcaaagctaacagccaaccaacaaataccgcctagcaatgatttccactggatgtgggagagggttaataaagacgctgttggtaacgcgtacagaactatcactggcaatcagcatactgagctatccagtggaggccagcatcgtgtttttgctaaaatacatgttgtagaagtcataattcatagtgaagaatctcaacaggttttcttacagatttaattactctcacacaaataattcatt

SEQ ID NO: 1175 - DNA, 251 bp, Homo sapiens
cagggaaggcagagatgtgcctggcatcacagtttattgtttataaaccatgacaataacagctgttgctcagcacaggcctagcagagcccactgcagggggacggcagcgggcaccagaggccttgcctggcccaacccaatgggaacacccagactcagctgggtccccaagggagacttggcacattggcatgggtgtgggacaggtaaagcatgcaagagggagaagagggacataaggggcatgc

SEQ ID NO: 1176 - DNA, 321 bp, Homo sapiens
aaaacaaaacattttatttaatgcagaaattctaaggtacaaaaacattttgtaaatgtcagctgtgatctactttcacctagttacagagttatgtacaaatcaagtcattaacattttcaatgtcaaaaatacagcacgctgttaagagttctgtcagtgctcattatcccactagatcccacaaagggcaaactcaaagatgaaacaaaggcaacgccatcaataaccaccatattccacaggctttctcccctaggacgtactaacagggagtttccacagggaaaaattctcttttaaaaaattaacagtaaaaat

SEQ ID NO: 1177 - DNA, 451 bp, Homo sapiens
  misc_feature (1)...(451): n=a,t,g or c
tgtgttaagaaatttttattctttcctttggatttgtgatgaaagcacataaaattacaagtggaagaaacatcatgccacaaaattgcatagaattattacaaaaatgtgaattatgcattttaaataatttgagatagaagaaccaaaatatgtacattttaagagcttcaaatactttgtcctatcttttttttcttcttaaaaggcaagagtcacaacgtccaatccatcacaaacaatattaacacagtgcacaagcgcaacattaaattcaaagtaatgcaagcaaatggccctttttttgggaattacttaattgacagcttatctactacaggagtattaattaatgtatggtggatactcaaattttaaaatggaatataaaaaacccanaaacacatgggctatgtcattagaaccttggaaaattgggnttacntgggcc

SEQ ID NO: 1178 - DNA, 278 bp, Homo sapiens
ttttttttttttttttttcacattctcaatatgctttattcaacagaacaaaagaaggcaaagagagcagagaaagcagtgcaggaatgcagactgcatcagaaggtacatcacttgccattcagggacactgcaagagaagatcaggacaactgacttgtcagatgagaactcctgagtgtagctataatgggcaggatggttagcaattaaagagaggactcctcatctgcagctggacctagactgagtttcagttcttatggggatataggtca

SEQ ID NO: 1179 - DNA, 386 bp, Homo sapiens
  misc_feature (1)...(386): n=a,t,g or c
ttttttttttcaggctgtttaattttattaaaaggttcaaatttgatgataaatggtggcatggttacttcaagcttcggatacaagacctgctcagccgtggacatatcatcgacacccactgccatccccaccaggagctcccccaaccctgatgtagtctgagaccgtaaataatgtaatgatttcttgtactttggtaaatatgccaggaacacttgtagctgtctgagagctacagagaatactaacttggtgggctttttttttttttaagaggaaggatgggtaataagtggaagcaatttcagcaggctgactgaaccccacacagtctcaggganggaaaaggggcttnccctctggaaanccatcatttaacntca

SEQ ID NO: 1180 - DNA, 329 bp, Homo sapiens
  misc_feature (1)...(329): n=a,t,g or c
tttttttgggatgcagcactttctttattgcccatccagggaacagccaagccagctccatctgcattctggctgcagcgtgtacattaggggactcaggggccacagtgtgggaccgtgcacactggcaaggcactggcggatntgggcaggccagttggacatggatagatgagaatgacaactcacagatgtcctagcttctgctggcccagctgccancactgncatcacccttttgcccagcatgtgtgcattgtcacccaaaacatcttgaaacttgccattagtgaggcattcaacaaagaagtaagctaagtgagtaggaa

SEQ ID NO: 1181 - DNA, 661 bp, Homo sapiens
  misc_feature (1)...(661): n=a,t,g or c
tacaaaagaaagagctttaattggacttacagttccatgtggcttggaatatcttacgtgaatggtagtaggcaaaaagagcttgtgcaggaaaactcccccctaaaataaccatcagatctcattaaacttactcactatcatgagaacagcacaggaaagacctgcccccataattcaatcacctcccaccaggtccttcccacaacacgtgggaattcaagatgagatttgggtagggacacagccaaaccatatcaatgcctctataaacccaccaggaacacttctagaaaatgttgaacacctccgaggccccacagaaccctcctctacccacatcttcatggcaaggagctaccatggatccccctccgagtgtgcccagaccagttacaggactggttacagtggaaggcaactgagaggcatagagcaagagctgccctcccactaaagtcacacaccacagaaagaactcattcttcataagaagactggagctactgaaaaagggacagacactagctgccaaaacctggctgaagtccacaacatcacatnccctcatctcagantcacacagggtgctctctacancatcacactggtttacttcagagactccacacacactaagattcctggttaattggttgtc

SEQ ID NO: 1182 - DNA, 431 bp, Homo sapiens
  misc_feature (1)...(431): n=a,t,g or c
taaatgggaacaaagaaaagaaaacagcctcagcctccagccttcccttttgggacctgcctcacaatgcaccctctcttccaggcacttcttgaattacagaggaaacaacagtgagtgagtccactatggagctactaccaggttggtttaatttgcatgggtcccagacgagtctcaagggcccaggagggtcacccacgctgtcgtctcttccgcccccgcagcttcagccgcctggtggcaggctgacgggctgcttcccaaacttctccatgatctctcggatcctggccatgttggttttgctaagtgtgaagtcacaccttgtggcccccatgtcatagccaaccatacagttcttgggtggatgcagtgaaaccttcggcctttgctgtgaccacatactctccaggggttcaggaaggcgn

SEQ ID NO: 1183 - DNA, 424 bp, Homo sapiens
  misc_feature (1)...(424): n=a,t,g or c
cggagaagtgccaagtttattagagtgagagagtatcaccctcacattgccaccaacagacatagatctcagagacacactgaccttgcaccataattatggtgaatttctaggttagaagataccttagaggtcaccgggctgaccctcccatctgatgtgttaacccctcttaaacatctccctccaggagactgaggtgagattctgtttaacatacggctatcactgaaactctggccagctctgaatctgcaccctggaggcggagaatgtttaagcactataaggcagtagaaggaaagttccttggctcaggccccaatggtccccctttttttaatngatgaaaggttcccagagtccagtgcaaagtccctcggaaatcccccccancaagcacaaagcacgaaaggaggcctgg

SEQ ID NO: 1184 - DNA, 471 bp, Homo sapiens
  misc_feature (1)...(471): n=a,t,g or c
ttttgctggaacgttttattaagttaagaggttcagggagcagaagagaaacaccttttgggtggctctggcggttctgcacccagcacagcctcgaaggagntgtggnngccatggaggcagctgctagctccctctgtcctgagccccatggtacgggtccaaatngggcaggaantgttagtaggaggtaangcnggaaaaaggtngcangctnccggcttttcccnntaaanaaaccccnccattgntgnttnctnggncttcgccanaactnttgggcaagggcaccancttnanaaanccaagcanaagggtngctttgaagacanaaaggggacccaagggttttggaagggcacacaggcccacccaaggaaatttggcctttttntttttttttttttttaaaagnataaaantgtttttnggaaaaaaaagggaaaaaaaatttattataaaaaatntcct

SEQ ID NO: 1185 - DNA, 447 bp, Homo sapiens
  misc_feature (1)...(447): n=a,t,g or c
cctttcagtctttatttgcagcaaactaccactttatatgacaggtttgtgtgtctgtacacgcacatacacacacatatccttaagctcgagacagggtgcggctttacagaccaaaaagtatggaagcttggttttaactggtgttagagatcagatggagaggaagtgcagcggtgctcacctggccgctcggttcttcagggagacagcgctgctggtgccgctgtcggctcancagcctcaccatcccccagggtgcatgctgtcgtggccaggcgcaaactacggcgggacatccgtggagaatcaaatacagggtccaatttgtgctccgtctcaaaatccagagcatctgaagaatagctggaactggagcgcatacgtgtagcccgtgttctccggcacacactggggaggactgtacatgtgaagccgagaaaaata

SEQ ID NO: 1186 - DNA, 246 bp, Homo sapiens
  misc_feature (1)...(246): n=a,t,g or c
gcaagataaggcactttgtttttaattctatcagtctctttagaatgaacgaaggtctgggtcctctggaaatctcaagtggtgctgcctgcanttntaaaaggctgagcacaaacccatcagagagccacagtcctaagtagactcctcggtgcgctctgcccacctgtccatgtgcattcagatttctcattaaattttccacagcatgaccagtggggatgacctgggtggccgttgtntcca

SEQ ID NO: 1187 - DNA, 387 bp, Homo sapiens
  misc_feature (1)...(387): n=a,t,g or c
aattttgaaatgtttatttcaaagagcgttggtaatttaaacgtcctatttaatccccaaaacagtcctgagggggagataaggcagttatcttcatagtacaggaaaggaaaaaagcgagggtccaaggccgactataccctcagctccattagcccccgaggcctccctgacaggcggggcggacaatcccagtgcagatgctctgtatcgatcgcatgctatcggttctttcaaggaacgtgtattgatcatcaattaagtggtgagtactcctctagatgtcgattcttagcaaactgcggaaactcctacagacaaaaactcaggtgtgggcgcagaagggccggggatgcgcttcggtcaagactttgaaggtncggggct

SEQ ID NO: 1188 - DNA, 563 bp, Homo sapiens
  misc_feature (1)...(563): n=a,t,g or c
tttttggaagacatctattgcatttattttctaaaagaaaaggcatgcctgaagggtcgcattactgcacattttaaacatggtgacaggctatcttctaaacctcaaggaattctgctgatgcaaactgtaatgactatctgctcctattaaacaagcaagacatcagtgagcggagacatcacaagcggttacttcatttctttctgttgcttccagttgctagcatagttgcaactcgcataaatatatttaatgtatccatgtagattgtcaacatcgaattgatgggatcatacttttgagctccatacatgggtgttatttctgcacgtttgattactttctgagtatcatacagaaggaacatgctgaaaagaactaatccaccatacattgccactgagtacagagtggcaccagcccaggaggtagggggaagaaacatagaccccngagaagacgccaagaccagacccaggccacttcccaggggtgctcccatgttcagaacttctcactangcgcacacatnggccncagtagagaggcctcccnccata

SEQ ID NO: 1189 - DNA, 403 bp, Homo sapiens; identical to SEQ ID NO: 752

SEQ ID NO: 1190 - DNA, 323 bp, Homo sapiens; identical to SEQ ID NO: 753
  misc_feature (1)...(323): n=a,t,g or c

SEQ ID NO: 1191 - DNA, 587 bp, Homo sapiens
  misc_feature (1)...(587): n=a,t,g or c
taatttcacacttgtaggctttatttcctcatctgtaaaatgagaaagtatgatcaggcggcttctaagtcttccagccaaaaaggaaggtaattttaaatcttgcaccactgaggctgtgtgtcgccgtggaaactccacagccaggctgcccaaagccaaaggagccactactgcagttggtggctcagaatcctctgctgccacctctgctcctcaagtggatgctccaaatccagaagtggatttcatgcttcccatgttgaaaacctaattcattcataacctgagtaactgggaaagaataattcttcagaatggggcaatttgtaaacttcaaaaaactgcagaactctacttgcttatgttgtcctaaatgtctaccataaattttaaatctctaaaaaattatagcaagggttcacttcaaagtcttcattgctgacataacgtggctataggtcctgctgctctgggtgccctttccatatcacagaagcactagccggaaaaagctctgggtttcantgattttactggatagagcaactgtagtcatcaacccaagagtaattgggatcatctgg

SEQ ID NO: 1192 - DNA, 417 bp, Homo sapiens
ttttttgcaaaagacaaaagaaaatatattaaaatgttaattaatagcagttttacagaggtgacaggatttgggggtgttgtttttttctgttcttcttccttgactgaggcaatacattttgtgttacttgtataataaaaaagtagatttacataccagaatggttgattggcttcaaaccaaacagtccaataactgacgcattaaatctttattgactaaacagcttaaaaaattactactatttccttttatttgttgttgtgaattttactcagaattaaagataaatgattagtaattacaggaaaactaacttgtaaaaatcttaaagacattgaatgggttaatgtactgagcagctacggaatgcaaggcactgtaggagtagggtgagtatactccccacaaggg

SEQ ID NO: 1193 - DNA, 448 bp, Homo sapiens
  misc_feature (1)...(448): n=a,t,g or c
gagacggagtttcgctcttgttgccaaggctggagtgcaatggcacgntcccagctcaccacaacctccacctcccagggtcaagcaattctcctgcctcaccctcccgagtagctgggattacaggcatgcgccaccacgcccggccaattttgtattttcagtagagacggggtttctccatgttggtcaagctggtctccaactcccaaccccaggcgatccacctgcctcggcctcccaaagtgctgggattacaggcgcgtgccaccacgcccagccttgggtgtttttctttcagctcctccagtactttcatactattctaataaatatattttgttggtatgaagctatgaagcaaaagtagctattaccaatgcatacatacagtacactggttttaagttccacctcaaagtgaatcttagagcctgggtgtaagtgc

SEQ ID NO: 1194 - DNA, 327 bp, Homo sapiens
  misc_feature (1)...(327): n=a,t,g or c
tttttgactataaaattgcaagtctttttttttttttaataaaaccaacataacagaatgtagaaatctaaacgaacatttctccctcaaagtagttacatccttagctccaacaaaactactattgttggagacttatttagaactcctgtttgaggaaaggccttaaaaggtggtttatgagccacattagaaaatacccttctaaactttgggctgtttaaaaacagaaaatccatactcagaggatgacaccgagaaaattaaaaaggtgctgcagctctcacggaggttcccnaaagacctctagcaagttctgagcaacag

SEQ ID NO: 1195 - DNA, 446 bp, Homo sapiens
atcaatgtcagggtccgtggtgtgtttcttggggcgggcatggtctccctgctcttcagagtctgtgtcagagcactcagagcttccaatatcttctgaatcagaacaagtcctttcctccacttgattttctaggagtgcagggaccttctgaactcctgacaaatctttcttcaatcctgtaacagtctggtatagaatattatcttgttgggcattcatggccatgtcctcttccttcaatttcataattatgtccatatccctctcataatttttcacttcattcaaggttctaggaatatatgctcgcttaaacacctcttcatccacatgatcttggctagaccgttcttccttggtcctttgagatgctatttccatggcctttgagagataagcatccatgttctcatggtgtaatgggatgggatctgtgacaaatt

SEQ ID NO: 1196 - DNA, 296 bp, Homo sapiens
gtgtttaaaattatttttattacttttagactttttctcaaaataattattcaaggaaatatttcttaagtggcccagtaaaactgtagagccaatagtcagttacaccatattcaaggacaaggatagtcagctatagataggaactgtctaaaccacgagaactgatctctgatactgaagtacccagaagtggctatattatcactgacttgaaacagatcttagtcacccatgtagcatttaattcaatgtttggttctttgcctcatttctttcttaggtcacaatctata

SEQ ID NO: 1197 - DNA, 397 bp, Homo sapiens; identical to SEQ ID NO: 761

SEQ ID NO: 1198 - DNA, 621 bp, Homo sapiens; identical to SEQ ID NO: 762
  misc_feature (1)...(621): n=a,t,g or c

SEQ ID NO: 1199 - DNA, 440 bp, Homo sapiens; identical to SEQ ID NO: 763

SEQ ID NO: 1200 - DNA, 381 bp, Homo sapiens
  misc_feature (1)...(381): n=a,t,g or c
gccaatcgttttgcttctattcgttatctcagcttatgtttgaagataaatccttacttttagcttttgccactttgttgcaatagcacattntttcggtttgccagatttcaggcataattctcattctaaagcactatcattagtataaaggaaggacaaaacattcagtgactcccctccgcnacccccatccccaaccccaacactacctacactaaatctagtacatcaagttagcttttttttttttcctgaaaaaaggcaaaaaagactttacattgcatcatacagcagatatcctaaatcagtcaaactatcagaggaaactgttggcgtacagctttacaaacaatttaccctaataaaagttccccagtc

SEQ ID NO: 1201 - DNA, 471 bp, Homo sapiens; identical to SEQ ID NO: 766
  misc_feature (1)...(471): n=a,t,g or c

SEQ ID NO: 1202 - DNA, 447 bp, Homo sapiens
tatggtagtaacagtttcattcagttttgcattttacaaatttaaacaaaagtctttcttttttttttttctttacttgcatgtttgtcttttgagtgtgttttcaatttgtgcattccttagaaaatctttgtgtggactttggagtttctccctgaaatgtgccaggcgcctgagtcagacacaaacactcccttaggaccttcgtcagaaactccacccctgtgtggaatctccttcctctctctctctccggagatgccacccgaattcgaatgtgactgtgtgtttctgctgagaggtccattgtcatccccagatgaaagaagagaccaaagcagttaccactgatggaagccagtgaagatggttgggggaactccttaacctttcctgggaatgttttgaacgaggacgccgggtcctttggccagtcaggaaccagca

SEQ ID NO: 1203 - DNA, 472 bp, Homo sapiens
  misc_feature (1)...(472): n=a,t,g or c
ttttttcaggacacagtgcactttaatgacatacagcatttaaaatccttcagacaaaggtctgaaaacagtcttttaatgcaagcctaaatcttcaagcacataaaatctttcttttttaagcttaatttcaacatcactggaagaaatacctatcgttaaaccctgatnngcattcttaaccacttgcagccagtgttcatgaggcaaaacgtgacccagagactttgttcaagttctcctcctagggcgtctacattcacggcggtcactccgtttctgtctccttttgtttggcacctgctggtgtgaggatcagggcttgcagaatgtccgacagggaaataatacccacaatactatctgcttcatttaccaccaccaagccgatggaccctcagctcttactattctggtccaggatggtctccaggaatttccagcttattggcacttnaaaaaacntttcaaa

SEQ ID NO: 1204 - DNA, 334 bp, Homo sapiens
  misc_feature (1)...(334): n=a,t,g or c
acattatttacgtttagtttattgcagagatgaagacagcatactagaagttggcttctatttcacaccgttcacagcactcactctgttctccatttcatccactcacccatgcaaaaggtctgtacacgcaatgatgtctgatgtttcttggtttccatagtgtaacaggaaacttgacatttcaattaaaaaggtaaaatgaagacatttaccatcagactataaaactcctcttctgtaagagaatactatagtacttgaagatatgatttgaaaaaaaatcatgtaccaaatganaggggcaccatttcaagagcactaggactacatt

SEQ ID NO: 1205 - DNA, 531 bp, Homo sapiens
  misc_feature (1)...(531): n=a,t,g or c
cgctccaaacgggtcttggctttaatgtggttttcttcaaacccaaatggctgaacattgctatgaacataggtcatgtatattgagacactgattccgttttatggagccctgtggctcatgacaggttaacgagagggcacgaaactccagtgcgacgtgctccattttgaaagcagataaagctcccctcatcagagtgaagaggaaagtagccctgctggaataaggggagagcgtaccgcttgaagacagggtgctcagatgttttcattccaagcaagacagtgataacagcacagcactgctcccatccctggcccctttcctttctcacttactagggctttttgcttcatgcaaactctgtggctggactttgagggatccagaatttaggatatagggcgggtccttcacgagggaagtgaccgtggctcagccaaaaatcacaagatctcctcaagattccagaatgtattccaaagctgttgtaccccttntccctccaccggctcccctttgcaagct

SEQ ID NO: 1206 - DNA, 381 bp, Homo sapiens; identical to SEQ ID NO: 767

SEQ ID NO: 1207 - DNA, 354 bp, Homo sapiens
tgctggggccacgtgggcatcctctttattggtgcttccaaggtgctggtgcagagcccttggctgaagggcctggactgtgggggagggtggcagccccagagacagcaggggagaggaagcgttctggcataaaaaaagagttcctgggtaaggctcctgtttccgagcattcgggcagcaaggggagtggcgcacacttctcagccgaagacactcttggtgggtccggctttgggcttctcaaagacagtctcggtacctgtgcgggtgcggctgaacaccgacggggcggccgagcagcttgctcacactctcgcatgacctggtaggtcttggacttgatttcctggt

SEQ ID NO: 1208 - DNA, 346 bp, Homo sapiens; identical to SEQ ID NO: 768

SEQ ID NO: 1209 - DNA, 403 bp, Homo sapiens; identical to SEQ ID NO: 771

SEQ ID NO: 1210 - DNA, 296 bp, Homo sapiens
gttttataaacctttattggaaaggctacaaactttatattgccaccacatttcttatgtttaaagtggttgtggggaagtaaccttggatacaaaactactatgctgttgaatcttacccaggcttgttgtaaaatattttttgtacaatggaggtagagtggataggtcaataatttaaacctcacaggacttgattagtgtcagcacaccttttttcattcaggttttcaggttctagcagaccttagaataaactgtggaatttgtttgcaagagttactggtggggacact

SEQ ID NO: 1211 - DNA, 348 bp, Homo sapiens
ttttttaggttttcaaagattttattaaaaaaaccaaagatatataacactaggacgggaccagcggacttgggggcagctcccagtctgctgatcagtaccctctgtcccagggctccacctggatggtcctgaggcccaaaccctgcctctcagctgcctcctgccctacaaactggtgactgctctcatccagcttctgatctgtttcatttaagatgattaaaatactcccctccccaattcgcttaaaaataattttcaaagattaaaaatttcatttgtgtgtgtgtgtttttttaaataagaactttaaatgtgggatatctccttcttcccctaggtcca

SEQ ID NO: 1212 - DNA, 504 bp, Homo sapiens; identical to SEQ ID NO: 772

SEQ ID NO: 1213 - DNA, 338 bp, Homo sapiens
tgacttcttattgaatattttactgtgttaacgctcattatttatacagacattaggtttacagaatattctgttttacatcaccaaaattcacagtccgagaataacaacataaccaggtcccaattcctccatgcaccccacaagcttctgtccaccctattttctggacagaaattagcacaacccacaggtttttcctgggccaagtcttcctttgctgccactgtcttggcttctaatcaagctctgacaggccaacattgtgaagtcctcaccctttcccattcacttctggtctcctagtctagctaatccccctcccccagaaggttaag

SEQ ID NO: 1214 - DNA, 458 bp, Homo sapiens
gcgaccgccgtcagacatccacgacagcgatggcagttccagcagcagccaccagagcctcaagagcacagccaaatgggcggcatccctggagaatctgctggaagacccagaaggcgtgaaaagatttagggaatttttaaaaaaggaattcagtgaagaaaatgttttgttttggctagcatgtgaagattttaagaaaatgcaagataagacgcagatgcaggaaaaggcaaaggagatctacatgacctttctgtccagcaaggcctcatcacaggtcaacgtggaggggcagtctcggctcaacgagaagatcctggaagaaccgcaccctctgatgttccagaaactccaggaccagatctttaatctcatgaagtacgacagctacagccgcttcttaaagtctgacttgtttttaaaacacaagcgaaccgaggaagaggaagaagatt

SEQ ID NO: 1215 - DNA, 486 bp, Homo sapiens; identical to SEQ ID NO: 777

SEQ ID NO: 1216 - DNA, 408 bp, Homo sapiens
cagcaacaaaaacctgtatttaagcggctaattccagagatgagtagtggagagagcaaatgagcctggttagagctcactctgggaggagtatgtggacgacacttggctgtctcttcagggggccaggctgggccctagcactcccggcagtggaaaggcagagctggctgccagctctggcctccgcctgggattcactcccatcctggctcagatctgtggctgtgcttcacccagtgggtcctccctcaaggagccaggcgggatctggaagggtctgcttatccccaccacagaacgcagactgttgctgtagtaacagaggagaaactcatcttcagtggtagggatattgctgatgtcgatgtaaacctggttcagattgtcgctgcaggagaccttgct

SEQ ID NO: 1217 - DNA, 249 bp, Homo sapiens
ttgagcaggagtgggctcaagttttatttggaatcatttaaaaaaaaaattcacagcagcataagtggggtcagaaggaccagagggtgggtggggccgagggagggcagtgaggttggtgcagcagcacaggtggacaggccaagggtggccaggaagacgagggcaggagcgtgggcagccgcatgtcactcaaggcgggcactccttgtgctaggaggggatggtgtccaaggcagaggagcgctc

SEQ ID NO: 1218 - DNA, 218 bp, Homo sapiens
ttaaaggttgagacacgtctaaccagtttaatgacttcgaaaccgtgcaaatgccaaactatggagcactagggatacaagaggcaccaaggcctggggggtgggggtgggggacactacaacattgtcatggggaaaacgggatcacctaatattggtaggggaaaagggcggtccactggcagctcagaactatgacatattcctcaggggagcct

SEQ ID NO: 1219 - DNA, 347 bp, Homo sapiens
tttttacaaagaaagaacagcggacgaaggtggccattttattttctcaaagccacactacctgctgctacacaggacataaaagtgcaaaattccaccaggaagggaaacaaaacagtcttgagacagccatgtctcagaggtgaagattggaggagattttaatatagggtgtgaattccaattcacatctcttccaacgggacctctttccgaagtcccgggaactaacattcatcaacacctctgacatcccagaggatcgcaacattcctgccaagggttattactcccatttcccagatgaagagattgagtccctgcagcacgcaattagacagtagcag

SEQ ID NO: 1220 - DNA, 396 bp, Homo sapiens
tttcagatcacgacaacaggtaacctttagtcagaactcaccacccactgtgttaagccttacatgacaatcaccatgaagatttacatacacatgttatatcatagtctcctcacaacatgtctaagaggtaggcacgtcattgttcccattttgcagatgaggaaactgaggttcagagagggcacttggcttgcccaaagtcacacagcagggagtggcagaggaagtcaggttgggtgaccccagtaactgctctcagaggctgggtgatgaccggcttcctggcttctctggaataaacctttgccaccacttcctgcatttcagcttcagtacaggcagagaatggggataggtgggggaatgaggtgagaggggagatgtttagaggtg

SEQ ID NO: 1221 - DNA, 339 bp, Homo sapiens; identical to SEQ ID NO: 787

SEQ ID NO: 1222 - DNA, 368 bp, Homo sapiens; identical to SEQ ID NO: 788

SEQ ID NO: 1223 - DNA, 337 bp, Homo sapiens; identical to SEQ ID NO: 789

SEQ ID NO: 1224 - DNA, 437 bp, Homo sapiens
ttttttttttttttttttttttttttgtaatttaaactttatttcatatctattgttaaattacacaaaatcagtgaatggtttgtaaagctacaccaatggacagatgtttacagttgaaatcatgggatttacataatggcaaaaatgtatatgtatatttataacatcctctatatacaataatcagtatagacagagaaaatgcacttaatctttgcaaatcatgcacaccacagcaataacacaaaatgttttttctgtaacaagcttttccactggctcaggcttcatcctgctttccaacaatacctatcagttttaaaagcaaacattttcaattaaaactaaagaaaattgaaataccatagtgatctactaactattttaaaaacacaattgtacacaaaatagttttactctaaaacactgtgact

SEQ ID NO: 1225 - DNA, 291 bp, Homo sapiens
tttttttttttgtttttgttttttttgagaaagagggtttatttagcacatctcagagttacagctcttacagaaagacacttgtctaggcacagcaggtgtgttcaaatttatatgaatgactacttgagttcagacgggattacgtttttcttgcttttgacttatattatttcacacatcttgaattttagagtctaggcttacacatcgtccagtttcttggcatggcttgcttaatctgagctttcaaacttcagattaacctggactgaggctaagagtttataa

SEQ ID NO: 1226 - DNA, 452 bp, Homo sapiens
tttttcctgttacgccgtcaatgcagcaggcaatgaggggaatgacacagccctctcattcccggaacgtagtcaatctcggctctgcggatttcacagaacacactttgcctattgccggctccaacaagaagtaactttccaggaagctgccggccccggacgcgccaggatcgctgcctgcgctgcgctggccgccggggattcacccggggaggcggggccgcgggggaaggctcgcggggaatacagcacactttcccctaaatccctcgtccgcgccgagtgcagggctctcagagttcacctagtcccacctctcacccacaacagtttataaatggggaaggtcagacaagttagtagcagagctgggtctagaacccaggagttcgaatgcaatccgaggctcatatcgagactttaagttgtccgattccgaagtttatttg

SEQ ID NO: 1227 - DNA, 443 bp, Homo sapiens; identical to SEQ ID NO: 792

SEQ ID NO: 1228 - DNA, 453 bp, Homo sapiens; identical to SEQ ID NO: 793

SEQ ID NO: 1229 - DNA, 541 bp, Homo sapiens
ttttttgagtgaaacacatactttatttctgtataaagattctttccaggagaccaggctggaaaacacggaaacctcaggaatggcccctctccacttatactcctctcctcacaaatcaggccaatgaggtcagttcctgagtcccctttctccaggattccactcagtccttgtctcttagtgtcctgttgggggataaggaggagaaggactcttgttctctagcttctccgataaaggcccccccaccgcccctcaattactgtggtctaggaactgtgagttcatgatatacatcagggctcctccctgagaaagcatgaggaggaagaggaggaagagattcacacaatacaaatatcacagtgacagcaatgagatctcacattttggaagtcacgtaacaaagatggttccttgatatttcatattctattactactggacattacaccaagtaaacacacttggataaacacagggtgatgcatttctagaataagaatgtgacccatgcacagtacaaatcatggtgttt

SEQ ID NO: 1230 - DNA, 422 bp, Homo sapiens; identical to SEQ ID NO: 794

SEQ ID NO: 1231 - DNA, 211 bp, Homo sapiens
gagaagtgtcagtttaatgaagccagcttatcagcagggcggcggagacacctgccccctcgcaggtgtgcctggctcgggctaaagtgcctgtgcagaacgaggctgcctggcggggttaggagtcggcgccctcgtcctcctcctcgggcaggatctccaggctgctgtcgggctgcggggctgtgtccgtcgagggcggcggggtggg

SEQ ID NO: 1232 - DNA, 306 bp, Homo sapiens
tttttttttcagtgacttatcaaaaatttatttcatataataaattatataatttattttcatctttaaacagtctacaccgaaaacatttttggaaacatcttttccttttggtaaaacaggttagcaggctgacatcagcttcatattctcatggctaaaatcccccacggttatacagttaagcatagcctttctttgtatttctcaagttgacaccacttgatataaactcagacaatataaacatttctagattttgcctaaggccttagctttaactgcagagtagtgagtaggaaatta

SEQ ID NO: 1233 - DNA, 589 bp, Homo sapiens
ttttttttttttttttttaatcagttaactttagttaaatgagtttatttgttcctttttaagaacctgttctaaaacactgcttcttaaagttcaatgagcatacaaatcacctgaggattttgttaaactgcagattgatttagtaaatctggggcaggcctaaagttttgcatttcttttttttttcttttttttgacccaggatccaaagcagtagagattttgcatttctaaaaaagttcccgggtgatgctgatggttctttaaggttctaaagggtgttaaattagccatgactcgaattagcagaaaaagggatgaaccaactgtacacataatccaaaagcccaggggtagacctcaggcatggctggatccagagggccacataatgttatcaggaaatatatttggccatttctcaggttggacttcctttgtgttaatttcattcccaagcaggctctccccaggtggtggcaagatgatcgcattagctcaggctacatctagcagctcacaggaactcattccaagtgctagaagcggctgcatcactgacaatactgtgccgggggaactcttt

SEQ ID NO: 1234 - DNA, 408 bp, Homo sapiens; identical to SEQ ID NO: 797

SEQ ID NO: 1235 - DNA, 439 bp, Homo sapiens
ttttttttatagaatctagcaattaccaagacatttattagttgtcaaaaagctttacaatcagtttcatgatcagaaaatagagcaaaatttcaatattgttttctttataaaattgatgaatttctgaaaagataaaggatcatttgatttttaaaaatgtcagcttcatcacatgatgttccagagatctgaccccaaaagcttctcaagttttactatccatagtgtccttatttgtaactgagacccatccgttattttccatctgaagcttcttcagcagtttataacaaagtgaaagaagttggactaagagagccatcatggatcttgtcttcgtaatacacttgtcaacctttagaaatactttattctgcaaagaagtcttagttactgtctggagctggtggcatagaggaattagcttgtttatttc

SEQ ID NO: 1236 - DNA, 110 bp, Homo sapiens; identical to SEQ ID NO: 801

SEQ ID NO: 1237 - DNA, 293 bp, Homo sapiens
gatcaaattattttcttttttgttgtttaccctatcctcaacaacatttttagtttaaattattgtagagattttttttgtggtggttattttttattttgctccaaaataataaggtgcaaagctattttatgcttaactgttgctctgtcaaaacagctatgcagtggagttgcatttgatgttctagagtttgattacatgcagagttgtatatagccaaaacttctcttatcaaactctgttatgtaggcatatttatatatacattaaagactgttgtactgtgtctc

SEQ ID NO: 1238 - DNA, 229 bp, Homo sapiens; identical to SEQ ID NO: 805

SEQ ID NO: 1239 - DNA, 286 bp, Homo sapiens
ccactccattgttttattatgtacaaacgttacagaacgggggggacagacacgsgtggggtaagavgggcctggggggaggggttcacagagcagacggtgcactgggaccaggggagcagaacacaggccataactatagggcaggtggggcaggaacgggttaaaaacgggatccaagccagccagatcgaaggaggtgcgggggcgtcgtccccttctgttctccccccaaggtcacagtgcatgcaataaaatatatatacaggggctagacccgtcctct

SEQ ID NO: 1240 - DNA, 294 bp, Homo sapiens
  misc_feature (1)...(294): n=a,t,g or c
tttttttttacantaaangtgattttaatttttgacattcctggggtgatattccttaggtaagnaagtagnactgtgttaaattcgcataccatgggcactgcttcctgaggcagtaattnctttcaaagcctttccttccgtgttcaatactttccacatttgtgcgtttgaatggatccatgtgtttagaccattattttactaaacacaaaatcatttggcacaaaaaaaaaaaaaaaaaaacctnttaccatacttntctggtcatacaganttttaggcaccncagta

SEQ ID NO: 1241 - DNA, 468 bp, Homo sapiens
  misc_feature (1)...(468): n=a,t,g or c
ccctttcntannaaatatctttaataaaaataggtttctgcagaacaggttataaaacaggaatagcaaactcaaattcctgccacccaggcagagacgagtggagcaggtggaggggggctaacggagagcccagagcagcaaccaacacagagggacctggtcattgacttgtgggttgcgtgcatctttttttttttttttttttgggacagagtctcactctgtcgccaggctggagtgcantggcacgattcttggctcanttcaacctccacctntcgggttcaagtgattctcctgcctcagcctcccaagcagctgggactacaggtgcatgccagtacgcccagctaatttttttgtatttgttagtagacatgggggtttcaccatnttggccaggggtggtttnccatcttttggaccccgngacccgcccgttngggctcccaaagtgctggggtg

SEQ ID NO: 1242 - DNA, 515 bp, Homo sapiens
  misc_feature (1)...(515): n=a,t,g or c
gncnnancngatggagtcttcctctgtcacccaggctggagtgcagtggtgcaaccctggctcactgcaacctctgctccctaggttcaagcgattctcctgtctcagcttccaaattttataaaacaattttacattttaatccctgttaaagggtgaaaggactcagaactttgacgcctgagaaagagttgcaggttttggggtgatggctcagagaagttttcggaaggagatgaggtctccttttacatgtttaagcactagggcacgaaagaggccacaaatttgttctgtgtgaccccatgggggccggggaaggaaatctaggactnactgggtgggaagtcatggggcagtcagatgtgggactcaatttagtgtaaagagggacttttgaatagctnggagcttttccacagaggtcatcncggggnacggtnaccctcagcacttggaagccatcaagcaccaggttacagaactcaaccgggcttttttaaaacggttttaag

SEQ ID NO: 1243 - DNA, 478 bp, Homo sapiens
  misc_feature (1)...(478): n=a,t,g or c
agaacaataacattctttttaattatgaatctgcatattagagcattgggggacagctagtctctgctctacttggcttcagctgaggtggcttggaggttgggagtcggaatcatctgaaggcttgctcgttttcacgcgtggtggttgatgttggctgttggctggagcttcantgactacagctggaatatctagttgtggcctttctatgtagctgcttggattcctcacagcatgatggctggattccatggggggcatctcttgaaggggttagtggcaaagtttggaagagcatgcaggaccagaaatggtgttattgggtctcactggaatttatggtctctgatcattcctgatgccattcatgcagttctggtgtggatggtgtcatccctttgcaaccctccccgatttttggaagctgagaggcacatctcatctcatgggcagttttccttcccccagctcttgc

SEQ ID NO: 1244 - DNA, 510 bp, Homo sapiens
taaggaaaacaccatccagtttatttttctcctgattcatctcatgccaacacacagacttcaatggacagcaggcaaaatggggaggcatccccagagcaagccgattctctacacactgccttcccttcctgtaagactcatcaaaaaggcaccccaactttgcatggatctgctgttggtattccttggggtgaagccagaagtcaggctttccacagagagacgggactacatggccacctgggaaggctagggagtcaaagggcctgaggaatgactacttccctccacaagggcattccctgccctgctctgcttcctgggggcttcagcaagccttccttctagagctcctagaaccctcccatggtcaacacaacagcagcccagacaatgagatgcaagaggcctgagctcacaggccattcaggtaagccagggtgagctgggcagctagatgacccaattttcagtccagaaagctctatctgctggactaatacttcc

SEQ ID NO: 1245 - DNA, 407 bp, Homo sapiens
  misc_feature (1)...(407): n=a,t,g or c
gtttgtttatttttactttattatttttttgaatactgacaatacacagttggttgaatccatggatgtggaacctgtggatggaaagagccaatttctgagggtaacaaatgggaaaatgatttcgtttgagtctaagaggttggcagcnttccaattcccctctngctgagtgtagccaaaagaagtgaatggttagcacagggcttggaatacccaagtcctcaaaaatgttggagggtatgagagaaggggtaatcccaagatgaggtccctggagaaaggancctacagttaagggccacagcaggccttccagccaaagatggccagctattacccacttcctttttaatccagggtangtagatggtccatncctaatgntaataaggnggggaaaaaag

SEQ ID NO: 1246 - DNA, 355 bp, Homo sapiens; identical to SEQ ID NO: 829

SEQ ID NO: 1247 - DNA, 448 bp, Homo sapiens
  misc_feature (1)...(448): n=a,t,g or c
caagccatgaaaagccttttaatgacaattggcatcacaggtataaataaatatcttcttctttccatctataatatgtgctacaaatatatttttcaaaggtccaacccaggttaggaggcttcaaggaccctttcttagctactgattttagtaattaaaaaaataaacacaataaacacccctggcatctttgtgagcgcccccctgcggagagcatcgagggctgtcaggcatcttcctcctgcagccgcagccaatggagcacacggagaactggagtcaggtgatcacgaaggggcttatttcactgggcgtggtctacgttgccacatgtgtcgctttgggatgaatgcattttttncaatgtgctgcttacacaattatgctggttccaaaaacacagttggattggacaatctaacataggattttaatccttagaggt

SEQ ID NO: 1248 - DNA, 253 bp, Homo sapiens
  misc_feature (1)...(253): n=a,t,g or c
gcagggtgggatgctttatttcactgtggcggggagggaacctggacagggggcggcaggcggggtggggggctggnactcaggcggggactaggcaggggaagggctgccccagnctgttgaggagaaactgaggccagccctgnggaaganctagcccagcngggtaaggagggtgggggaaaactgggtctgaaggaatgagggccccctccctctgggctttcctcctagagggcctcagtccctcctg

SEQ ID NO: 1249 - DNA, 476 bp, Homo sapiens
  misc_feature (1)...(476): n=a,t,g or c
gttttctcaactttattgtggacaggagaagggtaagtagacttgaaggttttttattttttaatgaagaaacaatttatcctgtgtttgataccagatgagactgtaagggtcacatactccttaagcctacacatcaattccaggtgaagtgcttcaggcttggctcattcngacacctangaaccgaanaangggcccntgnnggncangggttgggaagncctgtttttgccttagngccgtgcaggtttggggcattatataaacttttacaggcttgctgaagggaatggtgccctcgatgctggtttccacctgtggtgacatctcaccaccctccatccaggggcattttggaatgcgagcactggagttgtaggccagcagcagcctcacttccacctgggcatgcctctggtccaagcggtgtgggatagataaacctgagtgatgaagccggtgccgccctgggc

SEQ ID NO: 1250 - DNA, 416 bp, Homo sapiens; identical to SEQ ID NO: 831

SEQ ID NO: 1251 - DNA, 144 bp, Homo sapiens
catttcttataaatttattacataataatattataataattattatcaataataataatataagaaacatagatctctgtggggcgtatcacaacgtcagggtcaggaggcctcaggactggagcagggggtgaaaccccggga

SEQ ID NO: 1252 - DNA, 473 bp, Homo sapiens; identical to SEQ ID NO: 832
  misc_feature (1)...(473): n=a,t,g or c

SEQ ID NO: 1253 - DNA, 409 bp, Homo sapiens
  misc_feature (1)...(409): n=a,t,g or c
agtctagatgaatttattgccattcacatatttcatagaaaaaaagatgtagcaaacgggtcagggttgtacaaaaaaaaaaaaaaatccaggtttatataggttgctctatttacatctgagagcacagctgtcctggcatcaggcacagcagctgcacttgtctgacgtccctttgcagatgcagccctgggcacacttggcacagcccacaggnangcanggagcagcagctcttcttgcaggaggtgcatttgcactctttgcatttgcaggagccggcacaggcacaggagccaacaggcgangcaggagcagttggggtccatttcgaggcaaggagaagcaggagttcccgattcaagaggaaaacacgcagcgggacagattctcgtgccgaattcttggc

SEQ ID NO: 1254 - DNA, 423 bp, Homo sapiens
  misc_feature (1)...(423): n=a,t,g or c
ctgattcaggatgttcactcctgtgttatttattatatagaaagatcaaggggactggttaaactagacatatcacatccagccgctgctaaaaactaaagggaaatagtaggtgacaaaagcaggggtcctgaacagtggtgggctcaggggattggagttttttcctttatgtttttctgtattttccacaatccacgcttttcattgccattccatcagatgatgttaaggaggaacacagatccagtcacctgaggggatacttcctcactgccaccttctcagggtttagaccaacatgtgggttctagtttcccccagncccaaagctnttccctngcaaggaagagatcagtcttttgagcaaattttggctcaagactaaagacacagaaggcgaggctcctgcatgcacagcac

SEQ ID NO: 1255 - DNA, 452 bp, Homo sapiens
  misc_feature (1)...(452): n=a,t,g or c
ttttttttttcttcttcccttttctttccccctttaaactaagatagcagtaatgcatctggacgtttgacttctaatagcttcctgccacgaaccaattgacacaaaacagaatagcttgttaaaggacagattttttcccccttcagggagncaaagcattaacatgtcatttcctgaccaggatattaaatagtttatttagaagaaatgagttgaagtgagcgattaagagacacaaactggacttttgttttcttttactgtagcacccaggtttcatgtcagtctgtgtgcaccgaattttttttttaagtgaacctcattaattaccagctaggtggttggcttgtttaaaagaaaaaaaattcttgggccaactgttccttccctggaatcctaacaagaagttaaatgctaacagtgcgatgccggggtgtgtgtttgaggca

SEQ ID NO: 1256 - DNA, 289 bp, Homo sapiens; identical to SEQ ID NO: 838
  misc_feature (1)...(289): n=a,t,g or c

SEQ ID NO: 1257 - DNA, 111 bp, Homo sapiens
ctattttttgtataaacaaaattgcacaggtttatttgccacctccgcctcctccctgcctgctgctgtgtgcccttccacctgcagctcaggggagggcttctctggcct

SEQ ID NO: 1258 - DNA, 399 bp, Homo sapiens; identical to SEQ ID NO: 839
  misc_feature (1)...(399): n=a,t,g or c

SEQ ID NO: 1259 - DNA, 423 bp, Homo sapiens; identical to SEQ ID NO: 840
  misc_feature (1)...(423): n=a,t,g or c

SEQ ID NO: 1260 - DNA, 440 bp, Homo sapiens; identical to SEQ ID NO: 841
  misc_feature (1)...(440): n=a,t,g or c

SEQ ID NO: 1261 - DNA, 211 bp, Homo sapiens; identical to SEQ ID NO: 842

SEQ ID NO: 1262 - DNA, 341 bp, Homo sapiens
ttttttttttaccccagagtatttttattagggattcctgccaccatattaacatataaaacaatctggatgttgacatagaaatgcaaatttcactatacaaaggtaaggctccaatcacagtaacatggcccccatatctctagtatttcaatgaaataaactcattgtgaattcaccccgagttgtgtttataaatattagacaaaccacaaaatatattccaaatacataacattttacaatatttttcaagcacagacaaatacatactttactttacctacattgttttcatgatccaacttgcattagcactaaaggcaatattgtgtgtgtat

SEQ ID NO: 1263 - DNA, 342 bp, Homo sapiens
  misc_feature (1)...(342): n=a,t,g or c
gaccagtccccccaccattttaatgcaggggtaaactgaggctctgagcaggccagggtggagtggaaacacctagaggaagttgataagtcagcaagtcggcagcagagctgacaagctgggaccaggggctgtctcctttatgtcaaatgggccagcgtgacacagactgccccgggaaagcctcggaacttctcggattgggacagagtgctggggcagggaggaaatgtctcctcttgcttattcccttggccaactcaagggaagacgcttctcggggcctccaaaaccctngtgggtngattccatgtaactcaaggccccagggctcactgggca

SEQ ID NO: 1264 - DNA, 510 bp, Homo sapiens; identical to SEQ ID NO: 843
  misc_feature (1)...(510): n=a,t,g or c

SEQ ID NO: 1265 - DNA, 396 bp, Homo sapiens; identical to SEQ ID NO: 845
  misc_feature (1)...(396): n=a,t,g or c

SEQ ID NO: 1266 - DNA, 586 bp, Homo sapiens; identical to SEQ ID NO: 849
  misc_feature (1)...(586): n=a,t,g or c

SEQ ID NO: 1267 - DNA, 363 bp, Homo sapiens; identical to SEQ ID NO: 852
  misc_feature (1)...(363): n=a,t,g or c

SEQ ID NO: 1268 - DNA, 479 bp, Homo sapiens
  misc_feature (1)...(479): n=a,t,g or c
tgtagttcaataatattttattgtcaatagcataggagaaattcaatattgaatctcagaacaagaagaacctatttacaatgcatgtcaaggaagagatgggagaaggaatgtcacaaaattttttggtaaatacatattttttatagagaagtaatccatgaacctgcaacatggatagcttatccaaccaactttacaaattactattaatataagttacatgcttgccatctaaagtaactaaacccatagactgaaaaactatgtgtcaaggtaacgtgagcactttaatcactttacttatattttctaaaggcagtagtttcctctccttttcccgctatccatattaggatgaagagacaagttcctttccaacaccaaattctggatatcgggctattggtggaggaatccctggtggcgagtcagctagaagcccctggccacccaggnccaggtggccaacccaatgg

SEQ ID NO: 1269 - DNA, 513 bp, Homo sapiens
  misc_feature (1)...(513): n=a,t,g or c
ttttttttgaaagccgtaacatttattgaagagcggacatatgtttgcaaatcacagtgtgcatgggcatgcattacatggttcataatgctattccaattaggcttttcatagtgccttctcataacgtcctttaaaaaaaataataactgaaagggaaaagaaagtgtcaattgcaattacatttacaaaaccaaactgctgctttcaattagagtgaatctgtgcttcgctactcagatatacacatgtagattttccaaggcccatgcacacacttctgtaggggcagaaattttctatgaataatggctttagcaacccgaatagtatctctaaacattgacaagcttggggaacagggcaacaagtgcaatgaacaatacaatttctaacgtttgtcccagtcaacataccactttgccctggagatatttaacacagcatttcatttttggaatgataagggntaattcntccaatttanggggattatacngaatataccnataa

SEQ ID NO: 1270 - DNA, 386 bp, Homo sapiens
  misc_feature (1)...(386): n=a,t,g or c
agcggcacaaaacaacaattcattttatttctatcagttccataggttgattgggctcagctagttggttctttattagagtctcacaaggatgtagtaagataatagctgtggctgaagtcctctgaaggcttgttaaggctggacatccaggatggctcccacacatggctggaaatgatgttggctgtcagttgggagcttagcttgggatttcagctggagcatctacacaggacacctccatgtggcctggacttcacagcatggtatctgcaaggagatggagaatgcccgtggaaatgggtgggatataagcttccggcaaattgcaagcacaaaattccgatcnaaagcccccaaaagcaccatcaaaaccttaaacc

SEQ ID NO: 1271 - DNA, 403 bp, Homo sapiens; identical to SEQ ID NO: 858

SEQ ID NO: 1272 - DNA, 410 bp, Homo sapiens; identical to SEQ ID NO: 860

SEQ ID NO: 1273 - DNA, 434 bp, Homo sapiens
  misc_feature (1)...(434): n=a,t,g or c
ttggtgggtagctaatatggtatatttatttcacagtttcacatctttatcattgtttttatataaaaacaatgcttaagtggggtttcagaacagatatttccttttaaactttttttaaaaaatcacaaatatgattggctcatacaaccacatttcacctcttttcaccagcactcccacccattcccgttagaaatattttgttaaaaaaatcaggtgatcaaactcatagaaactgaattgtgagaagtataatggggaaaaggaatgagaacctgtggctctaggggagttacagaagggaaatcatcttttagagcccttggtttatttctgacaggaaaggtaaagccgtgcatttattagacccgggangctanggaatttaaagatggcgagattgtctaaaataactgaggctgaactgggaa

SEQ ID NO: 1274 - DNA, 408 bp, Homo sapiens
  misc_feature (1)...(408): n=a,t,g or c
ttctggtcataatgaaacactttatacagacaggaatagacaagggatttctgacacactcatgctttggatgtgtcagtacaagacagtatgtgagactgtgattctgccaggcagaggggaacgggcatgatttatctgctggcaaataagtctccactataccctaatcattcttttatcctaagtgcatcatgatctccttagtcctgggacgtcaaaatagtcaattatgggctccttggtaatttcctggtaaattactgctcccaggatcctggtctgacngangtcggtnatggggaatcgntggtggaggccgtgctgnatttccctttcaagcanacctgtcagcgtggtaggnggccaaanggatttccccctgatggcagtgaccaccacattgcg

SEQ ID NO: 1275 - DNA, 613 bp, Homo sapiens
  misc_feature (1)...(613): n=a,t,g or c
tagggggtctgttttataaatattttcttatcatacttttattataaacttttttagtatgaaatttgcttcaactgttacaaacagaatcatttcctatggggtcccctccacataaggaagttattcctgtaattactatttttaaatagtcttcttaactgtgggaaaactttaccctcccccagcacgcacacacatactctcctgtgatgaggctgaatgctatccagtgcactggttcagtcagcaatctgcccatgttcctgggagaaatcagtcccagtccttttgctgtcatggtgtctccagagccacccctttctgtaacaagcattttgaaattcatccatgctcatctcatttggatttcaatgtttcctcccactcaacagccgattcggagttcttgggaattgttggaaatattgattgcattttacttcgaaagtcgttcatactgtgaactcccaaagcnttccagactgcgacgaaatcacaccaaccccacaccatgcatacagggagncccagcccagagctcgcaaggcaagggnagaccgcnttccgggaatgcagccgtgggcaacttcccctaatggaccattcnggg

SEQ ID NO: 1276 - DNA, 484 bp, Homo sapiens
  misc_feature (1)...(484): n=a,t,g or c
gcgtcgacttgagtctttgtaccagaaagcaatagtngctgcccatatagcgctgatgcggaggaagtgcttgatggcctggacttcctctccctgaagtagactggaagcgtgacacattccgagccatccacggaagtgctgcagacctcgtacacgaaaatgtcatcccgaggcatgatgtggtttaaaccttcatccatttggaaaattttgtggaatcggtgattatacacatctgcgaccaccatattttctgcagcaatgccagacagcctggagagagcctcgcacaggtcggacacagcccccgtcagcggcacagtcacacggtactgagtaggtctgcagtgagggtcagcaggaaccaggaaaacctcataactcgatctttcttcaagggcagtggnagcgttagatagcaaaatgggtcaaaggtnccggaaacctnngcaanttttgggnaaaccaagtngatttnaaa

SEQ ID NO: 1277 - DNA, 512 bp, Homo sapiens; identical to SEQ ID NO: 867
  misc_feature (1)...(512): n=a,t,g or c

SEQ ID NO: 1278 - DNA, 456 bp, Homo sapiens
taagagagagggtctcgctgtgtcgcccaggcttgggtgcagaggtgcaatcatagctcactgcagcctcgaattcctaggatcaagcaatcctcctgcctaagtctcctgagtaactaggaccataagtgtacaccaccatgactggctaattttttacttttccgtagagatggagtcttgtgatattgcccagcctggtcttgaacttttggcctccgacaaccttcccatcatggcttcccaaagcattgggactacagacatggactagctccatttcttgatgtgaggccataagcagaaccaagcagactcaaggcccttggttgcttggacacaattagctattaataacatccaggaaaaagctcagtcttctgagtcaggaaaacctgggctggagtcctggctacactggtcaccagcagcagaagcctgggcaagatgcttcac

SEQ ID NO: 1279 - DNA, 410 bp, Homo sapiens
ggtatttagaaatttttttaattgaaattttgaaaattttttgactctaaaaaggtattaatgaaacataaaacttaacaatgaaggcagaagaagaacatagtagaaacaattactacaaacattttagcttccaatttcatataatgttatacagtttagaaggagatagtctattcgttaatagaaatagtaagtgtacttttttagcttctgctgtgggagcatggcatacaccagcttgggtggtggggaaagcgggtctgtaatgttccagcctctggttggctccatcggctgcttttgggcaacacccagctttagagatcttttttgttactttctgactttgcttattctttttcttttccaaccaagaacatgctaattctttgaaaattagtttgcca

SEQ ID NO: 1280 - DNA, 434 bp, Homo sapiens; identical to SEQ ID NO: 870

SEQ ID NO: 1281 - DNA, 314 bp, Homo sapiens
gtgtttctgggtcacttcctccatcactatttttatttttttccttaaactttatttttggcttttctgtctctgtagagacccctccttcttctgcttcctgttccccatcagaatcactatgcgaatctgatgatttggattcatctagggtgccaagtgaattttcattgaccttactagaaggcagatcactagtgtgtggaatgaaatcatcaggtttctcccatccgggatcccccggttcctgaataaaagtaatagggaaaaccatcttcacttaaaccttctacccaaacggtcttcactgctgt

SEQ ID NO: 1282 - DNA, 442 bp, Homo sapiens; identical to SEQ ID NO: 872

SEQ ID NO: 1283 - DNA, 350 bp, Homo sapiens; identical to SEQ ID NO: 873
  misc_feature (1)...(350): n=a,t,g or c

SEQ ID NO: 1284 - DNA, 420 bp, Homo sapiens
aaaacttttaaagaagttgtttattgccaataattaaagagctcaaagggaagtcatttaaccatgagattgccaaatagaactctacaacagctgattcaacctttttaaaattttccctggggagagacttcactactatctctgctgatggactccatagttctcatactttacctgaaagttcttcctaacatctgatctcaacctttcttgccggggcattggcctgttttcccagccaagccttgtttttgtttttgaggaacgaacagcttttttgggtacagaccaggagtccatgggtcttgaggacctctgtgtatttatcagttttcttctccacattctttttggcctgtctccatagacttgtgagccccatgccttgtttaagggggaaaaatggcatttccctac

SEQ ID NO: 1285 - DNA, 239 bp, Homo sapiens; identical to SEQ ID NO: 875
  misc_feature (1)...(239): n=a,t,g or c

SEQ ID NO: 1286 - DNA, 160 bp, Homo sapiens
  misc_feature (1)...(160): n=a,t,g or c
ccgctcaccctgatagcctgggtgttgatattcactttacccgcactcagacacaggcgaccttgaagcagttctcggtgtgtagagtccacgtgacagtccccacagcctccccagatagctgtgtgcctgtncgctactgctgtgccattttcccaac

SEQ ID NO: 1287 - DNA, 310 bp, Homo sapiens
  misc_feature (1)...(310): n=a,t,g or c
cagtgttgtaccatattgaatttatttnatgttaaagaaagaaatgacacatcgttatttgtttttcatccagcccccagtctatgttggtctgtgtcagggattggcaaactacaacccatgggccaaatcccatgcctatggtggtaaataaagtttcactggaatatagctctgcccaatgcatttatgtactgtctgtggctccctctactacaactagagggttgagtagtgcatcagagaccatacagtgccctgctatgctgagaaatgtttttaaataaaatgaatgggtaaaatcgttatt

SEQ ID NO: 1288 - DNA, 340 bp, Homo sapiens
  misc_feature (1)...(340): n=a,t,g or c
atactaaaagctatttaattgtatacttttaagtgggtgactgtatggtatgtacattatatatatcaataagctgtcttaaaaaagtgaactcaggggttgcaaatgaccacacatctgagctttagtccccattcatcaggggcataacctgtggagaaaaatcagggaattatgcagtatatgggttagacaggnaaacattctaggaagancgagattctatgtataancttaagggcaataaagcatcatggaaggttttaagcagtatataatcagatctacactttagaaaccccccaaatcactgaattgtacatttcaaacaagtgaattt

SEQ ID NO: 1289 - DNA, 265 bp, Homo sapiens
  misc_feature (1)...(265): n=a,t,g or c
gatgtttgtcatttttatttgcaatactttaggtccaagtttcaaactgcaatatttttacactcaagacacagtcatgcacaatccatatttcaattttctattgcttcaaccacaatttaaaataacaatattgaaaacaaaaatccttaaaaagnttggntgctgaggtcagaaggntggnaccataccatcagcaggnctacaaaagnaataacttacttaaaaatcaaacaaacaaaaagnccntaaatacctttaatcc

SEQ ID NO: 1290 - DNA, 381 bp, Homo sapiens
tttaccagtttttaaacttttaatgttctgaagtataagtaaacacatctcaacagctttacatattttcatatattttattttttaaactctcataactttgcaagctagcagtaaaatattgccttcaatattttactaattagcaccgtataccttttaaagctaactggaacattgattcattataaatgattgtaaaataaaatgatcatttcaaatgccaaattaatctcaaataacaagtgaactattattaattttatctctttttttggctctacgcacaaagatgtatttcaaagatgaacttaattatattagtatcagttttgtcaatctagcaaatcatagtatcacagtttaaagcaatatttaatc

SEQ ID NO: 1291 - DNA, 384 bp, Homo sapiens; identical to SEQ ID NO: 877

SEQ ID NO: 1292 - DNA, 223 bp, Homo sapiens; identical to SEQ ID NO: 878

SEQ ID NO: 1293 - DNA, 541 bp, Homo sapiens; identical to SEQ ID NO: 879
  misc_feature (1)...(541): n=a,t,g or c

SEQ ID NO: 1294 - DNA, 445 bp, Homo sapiens; identical to SEQ ID NO: 881

SEQ ID NO: 1295 - DNA, 445 bp, Homo sapiens
ttttttttttttagaggtttccaacacactttattttgcagaccactggtttgtagcttttgaggaccaacatctctatcaattcctataaaatgtccaatcactttcagttccgtagcaggctcttccatactgcacaccatgcttatggctggaggtccagttacacatgcatgaaggctgccctgcccactggttcctggaggagggcgcgtccgagttaaagcctcttccaggagcttgaacttcccaggggtcatttcctttggcaagaagtcagtttacatgtgcagctttggtgcctgtgagcagaaagcaccagaaatgggcaggatgtgctgctttttctctcacgaagatgggcacttgaggatccagcgcccttgtgcttaatgacaggaatccctcctcattgcttagtaggttaaaatataaggaagcctcc

SEQ ID NO: 1296 - DNA, 442 bp, Homo sapiens
gcggccgctccacatgcacagaatctactaggatttgtcacggccgggtggcaccgatttgttttgactatacaacaaacttttttttcaaaagtatttgttcagataacttaaaaataatataaaaataaacaatgaatttgacttttcctcaaaataaaaaaaaaaaggatggaaagtctaaacaatagcatatttttgaagtacaaatgaaatgtaaagacactggttcagcttaacgaaacagatcaaagagacaagttcttggctaatgctcttcccagtatcacaacaccaggccgtgatcaaaaaccaatacagacaagaaagaagaaaaaggaaaaggtgggaaaagcaatgtacaaaatttcaaagataaatacaatatttataattgatatgttacaaaataaagtcccttagcaactgcaagtgttcatgg

SEQ ID NO: 1297 - DNA, 385 bp, Homo sapiens
ttttttttaaattaaatcatctctcttatatatgcatccatcttttgttgaatacaagaggctccttttaaatatatacattcagtacttctacatttatgtattcatttaatctctgtactgtagtaaaatatgcattgttttaattcataaggatttcctggcaacaatcaggttgatactcactgcgtttgctgattaagagcttagtgagccactccagggaccaattctcccttctggatgcggagaagcccatgagctattttaggactataatgagactctactgtgaaagcaaaatctgtctaatcttattcttatcacttacatttgtgtaatctgtctatttaagctacctttgggagtaggggtaaaatgttac

SEQ ID NO: 1298 - DNA, 501 bp, Homo sapiens; identical to SEQ ID NO: 885

SEQ ID NO: 1299 - DNA, 566 bp, Homo sapiens; identical to SEQ ID NO: 888

SEQ ID NO: 1300 - DNA, 392 bp, Homo sapiens
ttttttttttttaatcttgccttttttttattcaaaaggatcacaagcttcacatcaatttggcttcaaaaagacctcatgtcttaaaactaagtaccgtgacatttattttgccatctgtgacagtttcacgtcgaaaaagcctcaacataaaaaaattaccttcaaaacccactgagacattctcacataaactaggatactgcacaaacaataaagttctttcttcaatagtcaatcttttcaatttcatccatgtcttcagcgttgagttgcttaatactgctgttaaagtggtcctggattttcatgagcgagggcagctcatctacttcaatcatgttgaaggcaaggctctttttcccaaagcgccccgtccgccctatgcggtg

SEQ ID NO: 1301 - DNA, 318 bp, Homo sapiens; identical to SEQ ID NO: 890

SEQ ID NO: 1302 - DNA, 451 bp, Homo sapiens; identical to SEQ ID NO: 891

SEQ ID NO: 1303 - DNA, 389 bp, Homo sapiens
tttgatttacaatgaagaaatttattagttcacagttctggacgctgggaatttcaatatggaggtgccaacatgtgttgagaggcttcttgccgtcttcttcaaatcatggaaaaggttccccaaattctctctcctttctgaagcgtctcttcgaagataaccctttctaaacatctcccttgagtacacataaaagtttactccaaatttgtgaaatgtactggcctagggagatgctcagtcaatgctgattaattttaggtagaatagaaatgtcaggcacagtgagcacctttgctgtgattgattgggtgtcgattctctgctatgaagcgaaggggtgtgctggatcaaacacatccctctggtgactagctctctgcttt

SEQ ID NO: 1304 - DNA, 292 bp, Homo sapiens
tttttttttaggataacaccatttaatgaacaatactggataacattaagtactattatcactttaaaattcaaacaatcttccaaacatcaatacatacacagttagtttaaaatcacagacaaatcggacttgagggtaaaagtgaaatcctcacctcttgcccatgtttgactttgggatggaattcagcaaagctctcccactgcagattgggagaatcaggtatttctcccacatggggggctgccagggaaggaggaccctatagggtggccagcaaggggccact

SEQ ID NO: 1305 - DNA, 335 bp, Homo sapiens; identical to SEQ ID NO: 895

SEQ ID NO: 1306 - DNA, 408 bp, Homo sapiens
aaagtttaccataattttattgtaatatcagaatcacataagatatagagttaagcagaaaactgatgaattttcttcagatgatctttaagaatctcaaaagccttgaagtttgctatcttctactgtcttattagaaggataaaaaactttgaatgaaaatccacttcttggaaaagagccagggtttatgcagaggcattcggtatttgtcgtagtgaaaggatcatatttgtctgcaatgacaagtagatcgggcacaggatacactctcaaagcatagtcatatgcccaatacactgggcagacataaagaggtaggggagtcagatgtccttgggataagatagtctttacaaagtgattaggaatagccaaattgctgctaggaaaacggacgcagtttct

SEQ ID NO: 1307 - DNA, 406 bp, Homo sapiens; identical to SEQ ID NO: 896

SEQ ID NO: 1308 - DNA, 455 bp, Homo sapiens
tttgccacagggtaaacttttattttagaatccaatcttttccccacacatacacaataaattaaacagaatccacagtaaatgtacattttttaacataaaaagtcagttactgttacttcatgatcacatgaggatcgtcacagctccgtgtccattagcacattaccctccttgtccttaactcttatccgaccggatctgtacttcgtttcttgatgaccgtttgcatatacggttttaacagtgccatctgggtattcccgtctcttgaactgggcagtatgtagttctctttggccattattaaactctatgagtttgttgccatcacgttgtactctgacaattgtaccatctgggaaaatgctttcttcttgtccatcaggaaataagtttttaacagtctggtcagggaacgtgaatttctttcttccatctgggtaatgtttttc

SEQ ID NO: 1309 - DNA, 419 bp, Homo sapiens
tttacaaatttaatctgtattaactttatttaaataaatgaccaatctgtcacccaacatgtcatgtggcttctctgcactgatcttgctttgttttcaaacttgtcacttgcaaatattataagaaaaaaaggtcatctaaaatgagttaaactggttacaattggtctcaacttttaagaatttacattcaaatggaataggacgcagtgtttttaaagtgcaagatatactcttttggctcaacatgaaacattatagaactggaaattaccgcagtcatttctcctacaacaaacttagttaaaagctgttttgaaagttagttagccatcagattataaactatgaaaaacactgaaaagtcatttaaaatgagtatataaatgcaaattacaaataaaaccagtgtgggagag

SEQ ID NO: 1310 - DNA, 265 bp, Homo sapiens; identical to SEQ ID NO: 897

SEQ ID NO: 1311 - DNA, 352 bp, Homo sapiens
tgatattacaagttctttaatgaataccttggtaacttgctgacaacttaaaagataataccactgatattcaaatacagtttataatcaagtccagtggcagatactgaaccgcccacctccacctcaatttgtgaaaacctgtcttttgtagggttggctaccatgggtaattacgcagcactgaataaaaaatagaatatttttctaatacttctacaaatataataaacacagtaacagtttgctgcagcgattttctttacaaagaatatttgggcccagtgctacagaaaaacatgaactacatcttatcgtcacaaaatagccattataaaatgaattttgcagc

SEQ ID NO: 1312 - DNA, 425 bp, Homo sapiens; identical to SEQ ID NO: 899

SEQ ID NO: 1313 - DNA, 443 bp, Homo sapiens
cggccgcggaggacctgtcggacgcgctgtgcgagtttgacgcggtgctggccgacttcgcgtcgcccttccacgagcgccacttccactacgaggagcacctggagcgcatgaagcggcgcacagcgcagtgtcagcgacacgagcggcttcagcgactcggagagtgcagattcactttataggaacagcttcagcttcagtgatgaaaaactgaattctccaacagactctaccccagctcttctctctgccactgtcactcctcagaaagctaaattaggagacacaaaagagctagaagccttcattgctgatcttgacaaaactttagcaagtatgtgaaacaagaagttctgggtcctttcatcataagggagaagcttcagaaagttccgaggacctgctaaaatcagctactagaatctgctgccagaggggac

SEQ ID NO: 1314 - DNA, 116 bp, Homo sapiens; identical to SEQ ID NO: 901

SEQ ID NO: 1315 - DNA, 164 bp, Homo sapiens
cagagaaataagcttttaatggcgcaatgttgcatatacgggtaacttgttctttgagaaatataaactcaaactcacaagttgtcatgataacatatgcagtaatatgaccattctacaacagagtcacccacaggtaaaacacatgactgggctttgagctc

SEQ ID NO: 1316 - DNA, 386 bp, Homo sapiens
ttttttgagacagtcttgctctatcacccaggctggagtgcagtggcacatctcggcttactgcaatctccacctcccgagttcaagcaattctcctgcctcagcctcccgagtagctgggattacaggcatgcaccataacacccaactaatttttgtatatttagtagagacagggtttcatcatgttggccaggctggtcctgaactcctgacctcaagtgatccatccactcaggcctcccaaagtgccgggattacaggcatgagccaccgcacgtggcctagatgaaagtttttaaaagcctgggctaataaaatcatccaccaatcatttttcttatggttaaagcagccaaaaagctgtcacagcatttttgagatga

SEQ ID NO: 1317 - DNA, 513 bp, Homo sapiens; identical to SEQ ID NO: 907

SEQ ID NO: 1318 - DNA, 166 bp, Homo sapiens
ttttggtagctattgaatcagggccacacatttaattgatattatgatcaagatgttcaaggcaaaaaatactattacttatttaatgtggaacaagtctagtctttctcttgagctcccacctgctggttaggaggcaacaatgttatttggatcctgtttagag

SEQ ID NO: 1319 - DNA, 497 bp, Homo sapiens
aattttaatttacaatgaaatgaaatgtgacacatgaagcataagaacacaactgaagactgcaaacaacctaaatcaattaccgagtttgctcaagcctccaagcaccagtcaaatatcgaagtcgtataaaaagtaggactttacacatttgtagccagctccagaatggaactaatttagaaccttcaaattctgtccagttgacagcaatttctgctattggaattttaaagaactgtgctatgtacagtagttctacatcaaatgccctgagcaattgattctttttctaaatgagctcgagatccacatgctatagccaattgattaggccaaggctgtagatcatttagccccttttctaatttctcaacatctggaaactttgtggctccatcagcatctgccataaggatcttttctcctcgagaactgaatatacccattctaatcgctccaccttttccacgattcttcaccagggttatcacacg

SEQ ID NO: 1320 - DNA, 233 bp, Homo sapiens
gaggtgaagttcttgtttattgttgcagcaactcttatacagacattagcgttcagttaaataaaggaagatagatagcacagtaaatacatcacaaccccaaactggatgatgtsgccacgggacggaggavsghasgsagggagggaccagtsaccgactgtcaaggaagtacattcagtgggtgtgcsggtgtccacattccaggctcacgtgtagatattccccbccat

SEQ ID NO: 1321 - DNA, 231 bp, Homo sapiens; identical to SEQ ID NO: 911
  misc_feature (1)...(231): n=a,t,g or c

SEQ ID NO: 1322 - DNA, 272 bp, Homo sapiens
  misc_feature (1)...(272): n=a,t,g or c
catgtttttatatttttatatatttttttgaaaaattacattaacagcataaaattcaaaagttatacagaagaaacaataagangtaaatctttcgtcctgtcctgtgccccatctagtaccttaagacaatcagtgatagtagtttcttggctgtaccttcacaaatattctaggtatttatattatttatttncccgtacacaacaacagcgtattatagacaacattctctcctggcttttttcacttactctttatccatattgata

SEQ ID NO: 1323 - DNA, 268 bp, Homo sapiens
  misc_feature (1)...(268): n=a,t,g or c
aataaaactgtttatttatggnacacattagaaaagaaaggttcgaaaacnncacaaaaacaacgggatgcatttaaaatcggtatgcagaggcatctaaaggattatacaaatctaaaattgcctaaaagattctttacaaaacgcaaatgaaaggctcatgcagcacatgancctggnttgcccctnctctgtctctcctttgcctcgatgctttgagtacagtaacccttttnctcagttacctttnctccttgaggctaatgaa

SEQ ID NO: 1324 - DNA, 442 bp, Homo sapiens; identical to SEQ ID NO: 914
  misc_feature (1)...(442): n=a,t,g or c

SEQ ID NO: 1325 - DNA, 470 bp, Homo sapiens
  misc_feature (1)...(470): n=a,t,g or c
ctgggaatatttatttatttatttggnctattaacaccaaganctgcaaaaaacaacctctaaacacaagataagaaaactcgaacattaacattctncaattttgtgtaagcnctgcagtacgganaatatacaaacttnaaacagctgcaaaaatagtgtctntgggagaanatagagtctctacatcgatacaagaaaaatagggcatttttctaatccatccagccctggggcgggncggagcngtntagagtcgccatttgccacctgggggggattgccagctctcctccccactacccacctgggggctgggcgggctgggctgctacttaaggacaatctttaggtcaggggtgaaagcgagatgaaaatggccacttggggaaaacacttgtttcctcccnctgccagcagctggattgggncaaggtgttatgggcccttaggggnctttttgggtcagt

SEQ ID NO: 1326 - DNA, 391 bp, Homo sapiens
  misc_feature (1)...(391): n=a,t,g or c
ggcttaggaaaaacatgtactttattggcaaattgttttagctgtagacggatggatgattctacagccacactcccctttccgggtgtacatccggggcctgtgcacctgcgcggaatcaggcaactttgtttttcccggtccccaaaaagctcacctttgacacaccctctatatgcacaggaaaactgctcttcttattcagggtctctttttgtggtggaattcagagaaactgggttgcaacatctttttagggagaggtcgagtatgttttttcattcgagtgactctgcatgcttaagggaatctgagtcggtataaaggggctagaccnctgaatttggcgtacagcgttcccngggtngcccgcagccccagggtacaactg

SEQ ID NO: 1327 - DNA, 471 bp, Homo sapiens
  misc_feature (1)...(471): n=a,t,g or c
cgcatatccagtgtaaatttatttttttacagcatccaataaatcccagtaaaggagctaaatgaagatcttaacatgaaaagtggtgtcagagctctttaggcaatgctgaaatgcacttgattttatgcccgtgggtggtcggcagcaagttttatttgcaaagcagcattagcaaacagaagcaattgcaccgtaaatgagtaacctctaaagtatcagtaattatatttaatgaaatgtccctcaaagtccctttgttatttgcaagtgacacattgtaaggaacttgcccatcccgctaagctgacttctcagccgcttcagtctcctgctccggacagcttctcttctggacagaactggacatccaggggggatacggagccccttgantgccctgccttgggccaaggttgtaagngggttaaggacnggggggaaaaanttccccccngggaactggagtct

SEQ ID NO: 1328 - DNA, 446 bp, Homo sapiens; identical to SEQ ID NO: 918

SEQ ID NO: 1329 - DNA, 432 bp, Homo sapiens
caaacaattgatttttattgcagtaagagtaacaaggaatcccacccctcacatgccctttgctttatgtaaaaacctgtccagcagaataagcaacagtcaccctcaggaggcgatttagccccaagtgcccatagaacagcctcaggcacgacttctgtgctccctcgctgttcccagagccatctgccaagaccaggaattcacctttggagtctaacttgttttctctttttttcacctctcaaaaaataaaaagccttcagtaatacagcccaaggattacccgtgtgtctaaaagaaggatagattcccataaacaatgttgtcagcttgagtgagggtaaacacagaaaggcacacaataaattaaagcagaccttgactcttcagagggcctggcggtgacgtctggggggggccagatctgcc

SEQ ID NO: 1330 - DNA, 440 bp, Homo sapiens
  misc_feature (1)...(440): n=a,t,g or c
agactgcatagggctcggcggggaggtgggccccagcagctgctaagagagtgaaggagctggaccaagccccgggggaggaaggcatcacggcaagggaagggtcgcagtcacaaccacacctcgagagggagacctgtggccaaagccggggggnacacactacagctgttcccgtgcccactttggtcctgagagactcagggccaggggtccagaacagttcagcataggaatggggcggggaaggcagagagggagaaggggctggctccgaccaagaagcagaancatggggatagctttgaatcttgccttcacaccctccggcctaactctatggagccacagttccaattgcttccaaccccttggggaaacccccccggccccggccttcctttggggacaacagagggcattaaagggattgggcttac

SEQ ID NO: 1331 - DNA, 471 bp, Homo sapiens; identical to SEQ ID NO: 926
  misc_feature (1)...(471): n=a,t,g or c

SEQ ID NO: 1332 - DNA, 418 bp, Homo sapiens
  misc_feature (1)...(418): n=a,t,g or c
gtagaaggaaagcattttattgcaaataactaatagttacaaaagcactttttaaatgttattattagatgttaagccgaaaatctagaaactaacatttacccaggttacaaaataagagcttcacatttttcaaagtctctaagggtaaggtacatccccagataaaatgagtataggccagtctcctttggntttgggggatccttnccaaanattttccagactatttagctttccttgtgtagttacagctcaaattagaaactgaagaaacagcaagtggccaggcagggtagaaagcaaataaactgagctacctgtgcctttttccaaattcagtatatgtgcttggctcctgaaaaaaaaaattctgatattgtaggcattccgattacttngtgagatattagtgaag

SEQ ID NO: 1333 - DNA, 383 bp, Homo sapiens; identical to SEQ ID NO: 934
  misc_feature (1)...(383): n=a,t,g or c

SEQ ID NO: 1334 - DNA, 260 bp, Homo sapiens; identical to SEQ ID NO: 938
  misc_feature (1)...(260): n=a,t,g or c

SEQ ID NO: 1335 - DNA, 277 bp, Homo sapiens; identical to SEQ ID NO: 941
  misc_feature (1)...(277): n=a,t,g or c

SEQ ID NO: 1336 - DNA, 309 bp, Homo sapiens
  misc_feature (1)...(309): n=a,t,g or c
ttnggtatgtggttcagctntttattntctccatggggtgggtgaagaggagtggcccagctgagctgaggaaggtgaccactgagaacccattcaacctgctgagcagcttgggcagaaaggagcaggacttgggacagacgactgaagatgcagagaccccatgggccccacccctgggccttcctcccatntggctgcaggcatcctntntnatcantgctgggttgcttcctggttaaagggccanaaggtnaaggagatgggnttttcangcatcagaatgaggttnaatttggtgcccacatc

SEQ ID NO: 1337 - DNA, 405 bp, Homo sapiens; identical to SEQ ID NO: 942
  misc_feature (1)...(405): n=a,t,g or c

SEQ ID NO: 1338 - DNA, 493 bp, Homo sapiens
  misc_feature (1)...(493): n=a,t,g or c
tttccaagccaacatttattnttgcacaagcctgttgcagtcctgaggggatcttctggcanaggtntgggtaggagctgagtggccactggggtgaagggagacagaggaggctntgccagcaggntcctatccagatgatacatgagatggaggctcctcagccacactccagggagggtggggtggcaagggggattcagggataatggcattaataatacaagtggtaaacaaataaccaagaggntctggctggttacgntacacaaaanttagcagtaagagtccgtgctttcacattcctatcagacagatctgagttcaaatcctgtatgtntagcagggtgaggtatctgctttctttcagagcccatgggtgcacatctctgagcctagttacaacagttggcacataggtnggtgacaaggagggcagctctttgattcctgnttgcttccacagcacagagagttaagtatggctggtnta

SEQ ID NO: 1339 - DNA, 326 bp, Homo sapiens
  misc_feature (1)...(326): n=a,t,g or c
gtggtcacagtggcaacggttagattggtgggcagggagaagttggacccattagagggagagggtggcatgctggagcccatgctggtcacgatgctcccgatgccaatccagaaggccatgacgagcccagccaacaggccacaacagcaccaggagggttagcacatggaaagaacattccaaggcagaagagtcccagcagcggtcccccaaccatgccaaagatgctgattgctgcctgcaacnaggtcccatntgggaggaaatataggccattcctagacaaagcagcccatagccaaaggaaaggncttctgggaaag

SEQ ID NO: 1340 - DNA, 424 bp, Homo sapiens; identical to SEQ ID NO: 944
  misc_feature (1)...(424): n=a,t,g or c

SEQ ID NO: 1341 - DNA, 429 bp, Homo sapiens; identical to SEQ ID NO: 946
  misc_feature (1)...(429): n=a,t,g or c

SEQ ID NO: 1342 - DNA, 246 bp, Homo sapiens
  misc_feature (1)...(246): n=a,t,g or c
gaaaatgctttaataagtgttgacaacactgttttgcannntgtaaaggtactatacaaatncttaatacaaaaagaataaattaaaagcagatttctttttttaattctgcaactttgtctacaacgtacatctttttcattgattacagttgaacagaatccagtaaaatcattttacatgctctacagtcagtttcaggggcancctaatctttttncccccattattaaactagagtccatt

SEQ ID NO: 1343 - DNA, 852 bp, Homo sapiens; identical to SEQ ID NO: 948

SEQ ID NO: 1344 - DNA, 1258 bp, Homo sapiens
ggctctggactggggacacagggatagctgagccccagctgggggtggaagctgagccagggacagtcacggaggaacaagatcaagatgcgctgtaactgagaagcccccaaggcggaggctgagaatcagagacatttcagcagacatctacaaatctgaaagacaaaacatggttcaagcatccgggcacaggcggtccacccgtggctccaaaatggtctcctggtccgtgatagcaaagatccaggaaatactgcagaggaagatggtgcgagagttcctggccgagttcatgagcacatatgtcatgatggtattcggccttggttccgtggcccatatggttctaaataaaaaatatgggagctaccttggtgtcaacttgggttttggcttcggagtcaccatgggagtgcacgtggcaggccgcatctctggagcccacatgaacgcagctgtgacctttgctaactgtgcgctgggccgcgtgccctggaggaagtttccggtctatgtgctggggcagttcctgggctccttcctggcggctgccaccatctacagtctcttctacacggccattctccacttttcgggtggacagctgatggtgaccggtcccgtcgctacagctggcatttttgccacctaccttcctgatcacatgacattgtggcggggcttcctgaatgaggcgtggctgaccgggatgctccagctgtgtctcttcgccatcacggaccaggagaacaacccagcactgccaggaacagaggcgctggtgataggcatcctcgtggtcatcatcggggtgtcccttggcatgaacacaggatatgccatcaacccgtcccgggacctgcccccccgcatcttcaccttcattgctggttggggcaaacaggtcttcagcaatggggagaactggtggtgggtgccagtggtggcaccacttctgggtgcctatctaggtggcatcatctacctggtcttcattggctccaccatcccacgggagcccctgaaattggaggattctgtggcgtatgaagaccacgggataaccgtattgcccaagatgggatctcatgaacccacgatctctcccctcacccccgtctctgtgagccctgccaacagatcttcagtccaccctgccccacccttacatgaatccatggccctagagcacttctaagcagagattatttgtgatcccatccattccccaataaagcaaggcttgtccgacaaa

SEQ ID NO: 1345 - DNA, 1364 bp, Homo sapiens; identical to SEQ ID NO: 949

SEQ ID NO: 1346 - DNA, 3635 bp, Homo sapiens
agatggctgccgacagtgagcccgaatccgaggtatttgagatcacggacttcaccactgcctcggaatgggaaaggtttatttccaaagttgaagaagtcttgaatgactggaaactgattggaaactctttgggaaagccactcgaaaagggtatatttacttctggcacatgggaagagaaatcagatgaaatttcctttgctgacttcaagttctcagtcactcatcattatcttgtacaagagtccactgataaagaaggaaaggatgagttattagaggatgttgttccacaatctatgcaagatttgctgggtatgaataatgactttcctccaagagcacattgcctggtaagatggtatgggctacgtgagttcgtggtgattgcccctgctgcacacagtgacgctgttctcagcgaatctaagtgcaaccttcttctgagttctgtttctattgccttgggaaacactggctgtcaggtgccactctttgtgcaaattcaccacaaatggcgaagaatgtatgtaggagaatgtcaaggtcctggtgtacgaactgatttcgaaatggttcatcttagaaaagtgccaaatcagtacactcacttatcaggtctgctggatatcttcaaatcaaagattggatgtcctttaactccattgcctccagttagtattgctattcgatttacctatgtacttcaagattggcagcagtatttttggcctcagcaacctccagacatagatgcccttgtaggaggagaagttggaggcttggagtttggcaagttaccatttggtgcctgcgaagatcctattagtgaactccatttagctactacatggcctcatctgaccgaagggatcattgtggataatgatgtttattctgatttggatcctattcaagctccacattggtctgttagagttcgaaaagctgagaatcctcagtgtttgctaggtgattttgtcactgaattttttaaaatttgccgtcgaaaggagtcaactgatgagattcttggacgatctgcatttgaggaagaaggcaaagaaactgctgatataactcatgctttgtcaaaattgacagagccggcatcagttccaattcataaattatcagtttcaaatatggtacacactgcaaagaagaaaatccgaaaacacagaggtgtagaggagtcaccgctaaataatgatgttcttaatactattctcctgttcttattccctgatgctgtttctgagaaaccattagatggaactacttcaacagataataataatcctccatcagagagtgaagactataatctctacaatcagttcaagtctgcaccatctgacagtttaacatacaaactggctttgtgtctctgtatgatcaatttttaccatggagggttgaaaggagtggcacacctctggcaggaatttgttcttgaaatgcgtttccgatgggaaaacaactttctgattccaggattagcaagtggacccccagatctgaggtgttgtttactgcatcagaaactacagatgttaaattgttgtattgaaagaaagaaggcacgtgatgaggggaaaaagacaagtgcttcagatgtcactaatatatatccaggggatgctggaaaagcaggagaccagttggtgccagataatctaaaagaaacagataaggaaaagggagaggtaggaaaatcttgggattcctggagtgacagcgaagaagaattttttgaatgcctaagtgatactgaagaacttaaaggaaatggacaagagagtggcaagaaaggaggacctaaggagatggcaaatttaaggccggaaggacggctctatcagcatgggaaacttacactgctgcataatggagaacctctctacattccagtaacccaggaaccagcacctatgacagaagatctgctagaagagcagtctgaagttttagctaaattaggtacatcggcagagggggctcaccttcgagcacgcatgcagagtgcctgtctgctctcagatatggagtcttttaaggcagctaatccaggttgctccctggaagattttgtgaggtggtattcaccccgggattatattgaagaggaggtgattgatgaaaagggcaatgtggtgctgaaaggagaactgagtgcccggatgaagattccaagcaatatgtgggtagaagcctgggaaacagctaagccaattcctgctagaaggcaaaggagactctttgatgatacacgggaagcagaaaaggtgctgcactatctggcaatccagaaacctgcagaccttgctcggcacctgttaccttgtgtgattcatgcagctgtactcaaggtaaaggaagaagaaagtctcgaaaacatttcttcagttaagaagatcataaagcagataatatcccattccagtaaagttttgcacttccccaatccagaagacaagaaattggaagaaatcattcaccagattactaatgtggaagctctcattgccagagctcggtcactaaaagccaagtttggaactgagaaatgtgaacaggaggaggaaaaggaagatcttgaaaggtttgtgagttgcctgctggagcagcctgaagtgttagtcaccggtgcaggaagaggacatgctggcaggatcattcacaagctgtttgtgaatgcccagagggctgcagctatgactccaccagaggaggaattgaagagaatgggctccccagaggaaagaaggcagaactccgtgtcagacttcccaccccctgctggccgggaattcattttgcgcaccactgtgccgcgccctgctccctactccaaagctctgcctcagcggatgtacagtgttctcaccaaagaggactttagacttgcaggtgccttttcatcagatacttccttcttctgattcttctagcattactcgttggtggcttcagagacagtgctgcctcctcctgagggagggaaggtaccagggagaacctgggaggtcctggagagggccctgtccagttgggtgatcaggaatcaaaccagcatcggaaagacttcccagcaccaagcttgagctgtgtcgtttcgtggagggggcagcgaggatgggcttgagctgttgagagatttctgccctagagatggcctttgtatatgggggggtggtggggggacacaaacacatcagacactccgtcctcacactggcaggacggtgttcatcgcattctcttctgtgaccagcctctaggctagcggctgcattcgtggtctgtgcaaacacttcgtggttctatatatcagcagcaagtgtgcaaaataaaggacctgttaactcagatttctggatattttggtggtagcttctagtcccagaatctgtgtttttaaaatactacatgacattctgtctattcaatcacctggtggtcatctttcttgtactaattaactgttgatgagcattttggatattctaggagaaagcctataatttcacatagtttctctttttcatgtaactgtaacctaaatgtattacttctgataaaactatatatcaaatgtcactgcaaattagttttatatctgtcatgtg

SEQ ID NO: 1347 - DNA, 2103 bp, Homo sapiens
ctcgagatccattgtgctctaaagagtctccaccgccgtccaggacccacttgcagcatggagtcgcccgcctcgagccagcccgccagcatgccccagtccaaaggaaaatccaagaggaagaaggatctacggatatcctgcatgtccaagccacccgcacccaaccccacacccccccggaacctggactcccggaccttcatcaccattggagacagaaactttgaggtggaggctgatgacttggtgaccatctcagaactgggccgtggagcctatggggtggtagagaaggtgcggcacgcccagagcggcaccatcatggccgtgaagcggatccgggccaccgtgaactcacaggagcagaagcggctgctcatggacctggacatcaacatgcgcacggtcgactgtttctacactgtcaccttctacggggcactattcagagagggagacgtgtggatctgcatggagctcatggacacatccttggacaagttctaccggaaggtgctggataaaaacatgacaattccagaggacatccttggggagattgctgtgtctatcgtgcgggccctggagcatctgcacagcaagctgtcggtgatccacagagatgtgaagccctccaatgtccttatcaacaaggagggccatgtgaagatgtgtgactttggcatcagtggctacttggtggactctgtggccaagacgatggatgccggctgcaagccctacatggcccctgagaggatcaacccagagctgaaccagaagggctacaatgtcaagtccgacgtctggagcctgggcatcaccatgattgagatggccatcctgcggttcccttacgagtcctgggggaccccgttccagcagctgaagcaggtggtggaggagccgtccccccagctcccagccgaccgtttctcccccgagtttgtggacttcactgctcagtgcctgaggaagaaccccgcagagcgtatgagctacctggagctgatggagcaccccttcttcaccttgcacaaaaccaagaagacggacattgctgccttcgtgaaggagatcctgggagaagactcataggggctgggcctcggaccccactccggccctccagagccccacagccccatctgcgggggcagtgctcacccacaccataagctactgccatcctggcccagggcatctgggaggaaccgagggggctgctcccacctggctctgtggcgagccatttgtcccaagtgccaaagaagcagaccattggggctcccagccaggcccttgtcggccccaccagtgcctctccctgctgctcctaggacccgtctccagctgctgagatcctggactgagggggcctggatgccccctgtggatgctgctgcccctgcacagcaggctgccagtgcctgggtggatgggccaccgccttgcccagcctggatgccatccaagttgtatatttttttaatctctcgactgaatggactttgcacactttggcccagggtggccacacctctatcccggctttggtgcggggtacacaagaggggatgagttgtgtgaataccccaagactcccatgagggagatgccatgagccgcccaaggccttcccctggcactggcaaacagggcctctgcggagcacactggctcacccagtcctgcccgccaccgttatcggtgtcattcacctttcgtgttttttttaatttatcctctgttgattttttcttttgctttatgggtttggcttgtttttcttgcatggtttggagctgatcgcttctcccccaccccctagggtaccagcaggcagagccttgccctctgctcaggctggggtccagtgggaggggcccaaaatctctgctcagagaagtgcagggggagccttccagctcactctccctgaggactggcgtgacaggggctatgggtgttgtttttaaaaaaagaaaatatatttttttgaaaaaacgactgcccatcccgggtcctttccctgatgggttggggcagttacctggttgctgttttaattaaaaactttagagcacaatggatctcgag

SEQ ID NO: 1348 - DNA, 2136 bp, Homo sapiens
gccctggaggcccggcctggccgctcccggccctggggtgcacatcggccctgagtcccgtcccaggctctgggctcgggcagccgccgccaccgctgcccaggacgtcgggcctcctgccttcctcccaggcccccacgttgctggccgcctggccgagtggccgccatgctcctgccttgggccacctctgcccccggcctggcctgggggcctctggtgctgggcctcttcgggctcctggcagcatcgcagccccaggcggtgcctccatatgcgtcggagaaccagacctgcagggaccaggaaaaggaatactatgagccccagcaccgcatctgctgctcccgctgcccgccaggcacctatgtctcagctaaatgtagccgcatccgggacacagtttgtgccacatgtgccgagaattcctacaacgagcactggaactacctgaccatctgccagctgtgccgcccctgtgacccagtgatgggcctcgaggagattgccccctgcacaagcaaacggaagacccagtgccgctgccagccgggaatgttctgtgctgcctgggccctcgagtgtacacactgcgagctactttctgactgcccgcctggcactgaagccgagctcaaagatgaagttgggaagggtaacaaccactgcgtcccctgcaaggcagggcacttccagaatacctcctcccccagcgcccgctgccagccccacaccaggtgtgagaaccaaggtctggtggaggcagctccaggcactgcccagtccgacacaacctgcaaaaatccattagagccactgcccccagagatgtcaggaaccatgctgatgctggccgttctgctgccactggccttctttctgctccttgccaccgtcttctcctgcatctggaagagccacccttctctctgcaggaaactgggatcgctgctcaagaggcgtccgcagggagagggacccaatcctgtagctggaagctgggagcctccgaaggcccatccatacttccctgacttggtacagccactgctacccatttctggagatgtttccccagtatccactgggctccccgcagccccagttttggaggcaggggtgccgcaacagcagagtcctctggacctgaccagggagccgcagttggaacccggggagcagagccaggtggcccacggtaccaatggcattcatgtcaccggcgggtctatgactatcactggcaacatctacatctacaatggaccagtactggggggaccaccgggtcctggagacctcccagctacccccgaacctccataccccattcccgaagagggggaccctggccctcccgggctctctacaccccaccaggaagatggcaaggcttggcacctagcggagacagagcactgtggtgccacaccctctaacaggggcccaaggaaccaatttatcacccatgactgacggagtctgagaaaaggcagaagaaggggggcacaagggcactttctcccttgaggctgccctgcccacgtgggattcacaggggcctgagtagggcccggggaagcagagccctaagggattaaggctcagacacctctgagagcaggtgggcactggctgggtacggtgccctccacaggactctccctactgcctgagcaaacctgaggcctcccggcagacccacccaccccctggggctgctcagcctcaggcacggacagggcacatgataccaactgctgcccactacggcacgccgcaccggagcacggcaccgagggagccgccacacggtcacctgcaaggacgtcacgggcccctctaaaggattcgtggtgctcatccccaagcttcagagaccctttggggttccacacttcacgtggactgaggtagaccctgcatgaagatgaaattatagggaggacgctccttccctcccctcctagaggagaggaaagggagtcattaacaactagggggttgggtaggattcctaggtatggggaagagttttggaaggggaggaaaatggcaagtgtatttatattgtaaccacatgcaaataaaaagaatgggacctaaactcgtgccgctcgtgccgaattcctgcag

SEQ ID NO: 1349 - DNA, 1792 bp, Homo sapiens
gaattccatatcatggcctgccgccgccgccgccgccgccggagctctgtagtatggcatcgaggagaatggagaccaaacctgtgataacctgtctcaaaaccctcctcatcatctactccttcgtcttctggatcactggggtgatcctgctggctgttggagtctggggcaaacttactctgggcacctatatctcccttattgccgagaactccacaaatgctccctatgtgctcatcggaactggcaccactattgttgtctttggcctgtttggatgctttgctacatgtcgtggtagcccatggatgctgaaactgtatgccatgtttctgtccctggtgttcctggctgagctcgtagctggcatttcagggtttgtgtttcgtcatgagatcaaggacaccttcctgaggacttacacggacgctatgcagacttacaatggcaatgatgagaggagccgggcagtggaccatgtgcagcgcagcctgagctgctgtggtgtgcagaactacaccaactggagcaccagcccctacttcctggagcatggcatcccccccagctgctgcatgaacgaaactgattgtaatccccaggatctacacaatctgactgtggccgccaccaaagttaaccagaagggttgttatgatctggtaactagtttcatggagactaacatgggaatcatcgctggagtggcgtttggaatcgcattctcccagttaattggcatgctgctggcctgctgtctgtcccggttcatcacggccaatcagtatgagatggtgtaaggagaagtctttcaagaatgacggaataagagacctgttttaaaaaggaactgcagcaatctttgaaagacttccaaagaatgttagagcacagtacataatacacttgccctgctccctctaccccttaccccacaacgtgcaactgacactcccacccagtctctgctccacctttcagcccacgtcacgtgtagtgtccattttgtgaagccctgttgtgccacagagtgtagccaggtccccctgcagctagtcctagtgaacctcaccccgaggccctgcatgggccagcccctccatctgtacttggtccaactgcaactcatcatcggtgactggttatcacaccatcgctggcccctttgggccctgcatgtagtgtgggaggctcctgttagctcctcactgtggtaaatgccacacacctttaagtagataagcagacgatagttatctgttcttttgacttaatctcatttggtttgattttccctctactaaggctttcctaccttcttcaggctgcctaagacatgtaacgaaacacttcaataattgtccatgaggagaaaaaaagcatgtgtcatgcatgaaggaaactgaacttgaggtggcctccttgcttgttacatacctgggtatgtgtaggcagtttagtgcatctttgcctctcagttgaaacctgtataaccctgttacaaagctgtgttgttgcttcttgtgaaggccatgatattttgtttttccccaattaattgctattgtgttattttactacttctctctgtattttttcttgcattgacattatagacattgaggacctcatccaaacaatttaaaaatgagtgtgaagggggaacaagtcaaaatatttttaaaagatcttcaaaaataatgcctctgtctagcatgccaacaagaatgcattgatattgtgaacatttgtgatatatgtattaataaatagagcaattacggaattc

SEQ ID NO: 1350 - DNA, 2689 bp, Homo sapiens; identical to SEQ ID NO: 959

SEQ ID NO: 1351 - DNA, 8841 bp, Homo sapiens
aggctctgccgttcagctgccgcgggcggggccggggcctgcggcgtcgtgcgccgtgcgggaccagttccaggcgggcgagaccgcgcagggcggggcggggcgaggcggccgcagggcggggagggcggggagaggcggccgcagggcggggagggcggggcgcgaagccgggggcgggggccacgcgtggggcaggcggtgctcggctcggctgacgtcggcccgccggcgccccaccacgtccgcgcgggcccgggttgccaccgccggcccccgcccctcccccggcggtgtcccggccggaaccgatcgtggctggtttgagctggtgcgtctccatggcgacccgccggtgctataagtagggagcggcgtgccgtggggctttgtcagtccctcctgtagccgccgccgccgccgccgcccgccgcccctctgccagcagctccggcgccacctcgggccggcgtctccggcgggcgggagccaggcgctgacgggcgcggcgggggcggccgagcgctcctgcggctgcgactcaggctccggcgtctgcgcttccccatggggctggcctgcggcgcctgggcgctctgaggtgagggactccccggccgcggaggaagggagggagcgagggcgggagcggggcgggctgcgggcccgggcccgggcacgtgtgcggcgcgcctcgccggcctgcggagacacgtggtcgccgagcgggccacgaccttgaggcgccgcttcctcccggcccggggttctcccgcggctggataagggtgatccgggcgcctcgttctgcccccgtcttcacagctcggggctggaggggcctaggggagacccacccggagaccctgcggccccgcgccggcctctttcccaacccttcggcggccgcgcgctggccggggagccgttggggaggccctggcggccgcgcagcaggtgcaggggcgcagagcctgggctcgccttggtacagacgagcgggccccggccttggcgccttcagtttccttccagtttttattttcgctgtgtctacagagcagatgacaccaatttggaaacccgcgagagtgggtagagctaagatagtcttgctgtagtagctgtgatattagatgctcggccatgacttagaggtgtttatttaaggactgtgaatgactcggtgatttcggaaaagcttggcttagatgaacggacatacacaggggagacagccctaaggtttgcagaaaaggctgattgtgctgtttgcgaagtcgaaataattggtgaaagtgtagaaggcagaacctctcaggaatgtctggggaggacaaagaatgtgttggctgactttgtttaaacataaaattgggcagactttaattgatttgtgaaatttttttcaaagtttgtttgaattagcccctatctcttctaacattatcctcttgtgctaattgattgaccattttaaataacttagctgttacagaaagaccgaaaggtgttcttcagtaaaatatattcaagtaagttacttaagtaacgccttaaaagatacagaaaagcaaaaaagtattggcgtattaaaaagaaatcaaaactttccaagtttaggcctgaacattgccttaaaaatatttaataaggcctcaaatgacccagtccgagactgcatgagcctatttattattaaattgtaaatattcttcatataaacaaaaatatataaccatgtctgtaacaaaaatggttttgctagcgttgttactctcttcccttctccgaggggtgatttaggcaacttcggaggttgacaatgccaagcagtcacaatagatagagctttaaagcaaattctatgcatgggtttggatttatgacaggcccgtcaccctgggcctgtcatagtaccccatgccagagcaaactgtgtccccgaaccattgcctggcctctgtgcccgtaggctgctggcactgaagtgggttgcacagtggaaaagaagaaagctctacctggcagaaatttttaaaggttaaaataaataattttaagaaagctggttcacaaggtgccacatttgatgaaagcaaaatacagtggcttttattgttactagagtgatgttcttgcttgtttttcttttttggtgaagttagccccaaattattctcatagctaagcaaatacgagagtgactgtaaggacagttggcattcccggaattgctaaacttggtaggcaacgctggtttaagaatactgagttctagccgggcgtggtggctcacgcctgtaatcccaacactttgggaggctgaggcaggcggatcacctgaggtcgggagttggagaccagcctgactaacatggagaaacgccatctccactaaaaatataaaattagccaggccccgggtgtggtggcacatgccggtaatcccagctactcgggagactgaggcaggagaatcgcttgaacccaggaggcggaggttgaggtgagccgagatcatgccattgcactccagcctgggcaacaagagtaaaactctgtctcaaaaaaaaaaaaaaaaaatactgaattctgatcaggtaacagcaactgtaatacaatgtgataagttgacttgaagattacagtttttaagaagtatatacccagctaatacatgaaaattaactcgtaaaatctcaaatgctccagacatttccatgatgcctgttggtcagtaaaaatcattctaagacttagtggaagtaggaaatgtttgtatggcaacgtggtgaaatcctgtctctactaaaaatgtgtataaaggctataatgtaatcccagcactttggaagaccgaggcgggtggatcacctggggtcaggagtttgagacccacctggaccacaaaaattagccgggcatggtggcaggcgcctgtaatcccagctgctggggaggctgaggcaggagaatcgcttgaacccgggaggcagaggttgcagtgagccaagattgcaccgctgcactccagcctgggtgacagcgtgagactctgtctcaaaaaaaataaaaaagtctataatgctattttaagtttctaaggaactgaaactgctctgaaataaatcagaccattataagacttttttccatatcagtgagctaagtgcagataagcttctgaaacttgcatgctagatttttttggtacaaatatttgaaatgcttagtgtgctgccttggaaaaacctggtattttttgttgtgtccttatactgccaaggtttatggaatcatgtaccttatgcctagtaataattaggatgaccaggccagtgagtggttcatatccggggcatgattagctctgcgtgtgctcagccagtgccccatcttcaactcgatgtgttcctaaggtagacagcaaattccctattttatttctcagattgtcactgctgttccaagggcacacgcagagggatttggaattcctggagagttgcctttgtgagaagctggaaatatttctttcaattccatctcttagttttccatgtaagtattcagtttacatttatgttgcaggttaatcttaagaattgtattgctaaggcttctaagtgaatttctccactctatttgcattttgttgcatttcagaggaacatcaagaaatcatgaacaactttggtaatgaagagtttgactgccacttcctcgatgaaggttttactgccaaggacattctggaccagaaaattaatgaagtttcttcttctgtaagtatatgaggcccatgctggcagtgcagctgagagtgccaggcaagtggaaaactttggcaaggtctaaggaagagcaatgaggcttacatgtcttgttatggaatgtagaaattaattcactggtggtaaattaatagtgataatggtgatactcatatcagtggctagactcaaaagagcaggattcattgtgactgatgggaatgaaggtcgctggctattggtgtggtgtgtggtgaggctgctagtgagtcacctgtgaccactcttgtttcaggatgataaggatgccttctatgtggcagacctgggagacattctaaagaaacatctgaggtggttaaaagctctccctcgtgtcacccccttttatgcagtcaaatgtaatgatagcaaagccatcgtgaagacccttgctgctaccgggacaggatttgactgtgctagcaaggtaagcgatagcagcaggcctcaaaagcgttgtataaaatgggcctggtattccccacgaggcagatacaagttgtgttttttgggcaataaatgctcactaaaggcaaatggggcgggggggtacatgacaacttcccatgcttttctgtttattccacgtgttaagccacatatggatagcatgacaccactcttctttttcagactgaaatacagttggtgcagagtctgggggtgcctccagagaggattatctatgcaaatccttgtaaacaagtatctcaaattaagtatgctgctaataatggagtccagatgatgacttttgatagtgaagttgagttgatgaaagttgccagagcacatcccaaagcaaagtgagttattcccccatctgagggcaagatcgggagcataagatatgtggattcttatcaaacaaacttaaatttctgattattatatttctatactttagtagaaagtagttgaaacccccattgagtcatgaagcctgggactcaaactacagaatatatcagcgacagtatttagaacaggattgtttttattttaattgtggctataagtgaacatctatcatgagacatttgctgcactttccttgcttgtaggttggttttgcggattgccactgatgattccaaagcagtctgtcgtctcagtgtgaaattcggtgccacgctcagaaccagcaggctccttttggaacgggcgaaagagctaaatatcgatgttgttggtgtcaggtgagattttggtgggatagctagaggtcaagacattgaacagtttgagttttacaggctttctcctagtgtttgctattattttaagaaatactaagacacagtgtctcgtctctttattttaccccagcttccatgtaggaagcggctgtaccgatcctgagaccttcgtgcaggcaatctctgatgcccgctgtgtttttgacatgggggtgagtatacgtgaccctgttagggaagggcgggacacaactgacaataactagtcttaattctagagttaactttttatggcagttggttctgtattacatgggtttcagcctatctgctgcatacatttttgttattagctgtggatctggctgacttattttcttgattctaggctgaggttggtttcagcatgtatctgcttgatattggcggtggctttcctggatctgaggatgtgaaacttaaatttgaagaggtaatttagaacaaaactgtaatactcagtagccgttctaataaattcctttttggaatatttcaaaatttaagtgtcttaactaataccacaatgggctgaagtgtcttggtgtgatatttttgagtgatttctttgtgctgtctgacattacacttgataccatttggttttctaaagtgtgaatcagctttcccagaagtcttggataattggttacattggaaatcatggctcacacctgtaatccagcacttggggaggccaaggtggtaggatcacttgagcccaggagtttgagaccagcctgggcaacacagtgagaccccatctctacaaaaaaaattttaaaattagcctggtgtggtggcgggcacctgtaatcccagctacttggaaggctgaggtgggaggatcacttgagcccaggaggttgaggctgcagtgagccatgatcatgccactgcactcagcctgggctacagagtgagaccctgtctcaaaaaaaaaaaagaaaaagcatgttgctgtgggcttcctagagaatatgctgactgtagcacatcatcaccccaaatgtgctttgctagacctatgcttcctctccttaaaatacttgaaatgtttagtcacttaggaagttaagccattatattggtgcttgaatttataaaatatatccacatggtttgttaaaatcatgacgtaggcagaataggatttttatcctgttggcatgtatttgttaaaatgttttgacatcttgatgccttcctaggtagtagttagttgcgtactgttctttgataaaaatcatacccataacatcctaaaggagatagggtgcctggaggggaatgaaaacgagccacctgggatatgtagcctggttttcagggagatgttgatgtttttttgcttttgttactttaatgataaacctgtctgttgatgcctggtctcatgatgtcatgtcacaaggccctgtgatgttactcccccatgtgaatttcccacaatgaaggctgctctttcttttctgtttcactctcttagatcaccggcgtaatcaacccagcgttggacaaatactttccgtcagactctggagtgagaatcatagctgagcccggcagatactatgttgcatcagctttcacgcttgcagttaatatcattgccaagaaaattgtattaaaggaacagacgggctctgatggtatgtataaaggacgaatcacttcatgtataactgaaagctgatgcaaaaagtcattaagattgttgatctgcctttctagacgaagatgagtcgagtgagcagacctttatgtattatgtgaatgatggcgtctatggatcatttaattgcatactctatgaccacgcacatgtaaagccccttctgcaaaaggtaatttctgagcatactgtataaaacaattaagaggactggtcacaacacgtgtaattaagtagtacttcctctctccgtctctttatatagagacctaaaccagatgagaagtattattcatccagcatatggggaccaacatgtgatggcctcgatcggattgttgagcgctgtgacctgcctgaaatgcatgtgggtgattggatgctctttgaaaacatgggcgcttacactgttgctgctgcctctacgttcaatggcttccagaggccgacgatctactatgtgatgtcagggcctgcgtggtaagtaagccatgcatgttgatggtgctgccaagaataggcaccttcttggatgtgtgcttcttgtctagacgaataagaaattgtcttgcctaagattaaatatatatggatatttttcctaagaaaagttttagaaaagactgatgagtgtatttctatgtaattggaatatatttaagttcatgccatgtgtcttgtggtttccttattaccaaaacggtgactgaagaaacgcttgctttagaaatacattgaattggccaggtgtgctggctcacacctgaaatcacaacacattgggaggccaaggcagaaggatcacttgagcccaggagttcgagcctgggcaacatagtgagaccctgtctctacaaaaaattaaaaaattagttggccatggtagtgggcgcctgtagtcccagctgcttggctaaggtgagaggtttgcttgagcctgggaggttgaggctgcggtgagctatgatagcaccattgtattccagcctgagtaacagagaaagaccctgtctcagaaaaaaaaaaaatacattgaattgtttcctgatggaagtaaatactctcatgcccagttaggagtgagtcagggtttttaatatgccactttttctttctcaggcaactcatgcagcaattccagaaccccgacttcccacccgaagtagaggaacaggatgccagcaccctgcctgtgtcttgtgcctgggagagtgggatgaaacgccacagagcagcctgtgcttcggctagtattaatgtgtagatagcactctggtagctgttaactgcaagtttagcttgaattaagggatttggggggaccatgtaacttaattactgctagttttgaaatgtctttgtaagagtagggtcgccatgatgcagccatatggaagactaggatatgggtcacacttatctgtgttcctatggaaactatttgaatatttgttttatatggatttttattcactcttcagacacgctactcaagagtgcccctcagctgctgaacaagcatttgtagcttgtacaatggcagaatgggccaaaagcttagtgttgtgacctgtttttaaaataaagtatcttgaaataattaggcattgggacgtttttatggtgtgttcattccagacagttcacgaatcccgtatagctcgctctgattctcagagaacaatgagtgggtccacccacacacaggtaggaggacaggtgagacggaagccccatcctcccatgtggacggtgcacatctgctcagcccaccccacatgtccagagttggctgcaaactccttgtccagagcctctggtggtgggacctacttaagtctgacggacctgtcctgtccaggccagtgcccagggaaggtgtgggaggccctttgagcctggcctgcagagaccatccgtgtcccctcccaccttcatgcctgtgagaagttaggaatgtatacggtaccacatttggcagtcagcttattttaataaattcagcaacagcaagtccctaccatgttgtgtatcttcaccatcttgtctgaccatgaccactggccttgtgtgttcttttactcaacgtgtacccccgctctcccccaaa

SEQ ID NO: 1352 - DNA, 4270 bp, Homo sapiens
agagtcctggatgagacggctcgagagcgtgcccggctgcagatagagattgggaagctgagggcagagttggacgaggtcaacaagagcgccaagaagagggagggcgagcttacggtggcccagggccgtgtgaaggacctggagtccctgttccaccggagcgaggtggagctggcagctgccctcagcgacaagcgcggcctggagagtgacgtggctgagctgcgggcccagctggccaaggccgaggacggtcatgcagtggccaaaaagcagctggagaaggagacgctgatgcgtgtggacctggagaaccgctgccagagcctgcaggaggagctggacttccggaagagtgtgttcgaggaggaggtgcgggagacgcggcggcggcacgagcggcgcctggtggaggtggacagcagccggcagcaggagtacgacttcaagatggcacaggcgctggaggagctgcggagccagcacgacgagcaagtgcggctctacaagctggagctggagcagacctaccaggccaagctggacagcgccaagctgagctctgaccagaacgacaaggcggccagtgcggctcgcgaggagctgaaggaggcccgcatgcgcctggagtccctcagctaccagctctccggcctccagaagcaggccagtgccgctgaagatcgcattcgggagctggaggaggccatggccggggagcgggacaagttccggaagatgctggacgccaaggagcaggagatgacggagatgcgggacgtgatgcagcagcagctggccgagtaccaggagctgctggacgtgaagctggccctggacatggagatcaacgcctaccggaagctcctggagggcgaggaggagagcctgaagctgtcccccagcccatcttcgcgcgtcaccgtctcacgagccacctcgagcagcagcggcagcttgtccgccaccgggcgcctgggccgcagtaagcggaagcgctggaggtggaggagcccttggcagcggcccaagcgtcctgggcacgggcacgggtggcagcggtggcttccacctggcccagcaggcctcggcctcgggcagcgtcacatcgaggagatcgacctggagggcaagtttgtgcagctcaagaacaactcggacaaggatcagtctctggggaactggagaatcaagaggcaggtcttggagggggaggagatcgcctacaagttcacgcccaagtacatcctgcgggccggccagatggtcacggtgtgggcagctggtgcgggggtggcccacagccccccctcgacgctggtgtggaagggccagagcagctggggcacgggcgagagcttccgcaccgtcctggttaacgcggatggcgaggaagtggccatgaggactgtgaagaagtcctcggtgatgcgtgagaatgagaatggggaggaagaggaggaggaagccgagtttggcgaggaggatcttttccaccaacagggggacccgaggaccacctcaagaggctgctacgtgatgtgaacccacactcctcatccacacacctttctttacccagagccactgaaaactattttttatcattggctttctttagttcttgatacatttctagagaatttctaagcgaactgccagaacgtgtgggtgggtctcccccagccctccctcctggcgggtctcctccagcctcacttcgctgccacttcgccgctgccccggagacttttcaatcccaccccactcctcatctcaccatttggtcaaattggaagcccagggccaggacccggaggtttagaagatgcttgggcttggagggaggagggccggcgaggctagcgaggggacaggagacggccctgctgcggacggagcgcggaaactgcgtaggaattcagtggtggtgggtttttttaaggctttctacaaaaccaaattcagaatccaggcgtcgacctggtggggcccggggcaagcctgcattctggctgcccagcttcggacagcgggaactcctcaggcagccacgcagcgggtgtgggccagcatggggatggcgtggccccaggggggttttcactccgctgcctgggcttccagattcccgttctggcagcgaccggccgggtttctcggaccgttgactttatttgggggagttttcccgcagttcagttcctgactgtgcaaggccaacagggcaggggaggggaagacctggggaaggaagaatgaggacacagtcccgtcgtaagacctgtcacaacaataagcagggaggggagatgtggaggggacacatctggttgccttggaggcagaagctgtgagtttcagaacagctgtctgcagggaacgccaccatgttgaccctctggaggagagcgctgtggagcccctcccgtgttccagctccgtctgccctgtgcctatatatcacatgcgtctatcatactgtgtctttatctgtgatttttctcgctgaaacatgtttctcagacagccaaggccacctgactcctatcacgacgcacccaagcccctcagtccagcttcccaatgcctggcacccccttcggcaatagctcaccgtttacaccctccctcatagatacacagaagttatttttttaatggatatttatttttttacattggtcagtacacaggtcagggagctcacgccagggccttgaggacaggctgaccctcctccccggggtggcgtggggctggggcacccccgacggcagagcctccttcagaaagtgcagctcaagtcttaaagacaccaaaactgagccatgggcacgcgccgtctccgggccatggcgttcactgcagggcgggggcggcaccgctcccctgtgactgcatcccgcctccctggggacctgcctgtggcaggaaggaatggggggccccagcccaggccgggaaggagccagcggccgacaaagcagaaacaccgctgctccacgtagcccctgctggctgtccttgctctcagaagtcccggtcccatgtagatagagcccggcggatcttaccaaagcatttcctcctggaggctacgccgcttggtgctcccagtgaggcggctggtagggagctttgcctgccccggggataccctctaccagccgctggaagtgggaatgctggcgacagactgtgtctgtttcccaccttcatagcaggaatcacccggacccgactggctgggcttcgtgctagcgagggttttctgggggtgggtcttggtgatcttgtcctatggggatctctgcagtggtctcagccacatcctagtatattttggctctggaggagcaaagctgtatcctggagttggtctgtgatttgccgacagacttgcaggctgggctcagcaaagtcccccccaaaacccgcaggtcctcatgtccagacgctgccagtcctgtcctgaaaacagcacgccccaggcccacagaaccccccaccctacatttgccttgggtggagctgggggtggtcctaggactgcgggtgcccttagctgaagggggcccgcagaagcgtgagctgggccgcctgtgggtcattggaggttcattgagaattgagtcctttggaaagactaagaaaatcaaatttttaaaagttatttatggcctgggaaacaatttgcatttgtccccaaatacgcttagctgtgtgccgcttagaacgatgagaaaccatccctctgtgtaagcccgtgccgtgtgactcgaagcctagcgccctccctgcgaagcatcagacgccacccagccctgggggaggcccacgcctgctggaccaacgcgggttctggggtgcacagcgccaggttaacgctgaagcctgccccgctgagcccaagagccgggaggcctgcgggctgacccagaatccgatcatgcacctgtcctcatgccagcggctttggctggggttggtctgaagcctgcacgcggcagttctttgttaaagatctgagggactcgtcagtcctagcgtcgccgcctgcagcctcttccaagccctgcgtccagcgagcgtcacagcacaacctgcaaaaacggagctgggctgcagctggggctggcatggactttcatttcagagattcggtttttaagaagatgcatgcctagcgtgttcttttttttttccaatgatttgtaatatacattttatgactggaaacttttttgtacaacactccaataaa

SEQ ID NO: 1353 - DNA, 1375 bp, Homo sapiens
tcgaattccggaagccgctcccgacaccctttgcctggctctgtccatattagttcccaggcggccgtcgcgttccagcagcggcacgcagcgcaggcggagcggcagcggggcctcggctctatagagccgagccgctggtacccgcccggtaccgcgcgagccagtgcccctggatcttgcctctgctccgacgccgttccccaccagttagcgacagcgcccgcccctctgaggagacacgaaggtggttccccagccgctcaaatttccggaccaccgcgctttcccctcctcagcctgggctgtgctctctctagaatcctcgggcccccactttcttcccaaactcatcctaaatctctcacacacgcgagtgttcccagccctcaagccagctgctcctcctccgttcattttctgcccctcttcgcaaagcacccccgggatcatcctccgagggcgactttttgagaaatctcggtggagtagtggaccagagcaggggagtttttaaaagccggggcgcgagaaacaggaaggtactatggcttcctcgtctggcaacgatgatgatctcactatccccagagctgctatcaataaaatgatcaaagagactcttcctaatgtccgggtggccaacgatgctcgagagctggtggtgaactgctgcactgaattcattcaccttatatcttctgaagccaatgagatttgtaacaaatcggaaaagaagaccatctcaccagagcatgtcatacaagcactagaaagtttgggatttggctcttacatcagtgaagtaaaagaagtcttgcaagagtgtaaaacagtagcattaaaaagaagaaaggccagttctcgtttggaaaaccttggcattcctgaagaagagttattgagacagcaacaagaattatttgcaaaagctagacagcaacaagcagaattggcccaacaggaatggcttcaaatgcagcaagctgcccaacaagcccagcttgctgctgcctcagccagtgcatctaatcaggcgggatcttctcaggatgaagaagatgatgatgatatctgaaattcaccagctgagtttctatttcttctataaatgtttttccctgcacaacaaaaacagtgaaagaaatgcttatctgtaattttgtatgcatcttggtggacttgtcattggtattctagagatgtctgctataagtttcatctgttgtgtgctatacatgtaaaaactgtctctttgaactattgaaaatttaaggttcagtataatatcaattttgaatttttcctggtgtttatgaaattttagatagcagcaagtcttcgtttgatcataaacagtgtacagataactcaa

SEQ ID NO: 1354 - DNA, 3358 bp, Homo sapiens
gagctggagcagccgccaccgccgccgccgagggagccccgggacggcagcccctgggcgcagggtgcgctgttctcggagtccgacccagggcgactcacgcccactggtgcgacccggacagcctgggactgacccgccggcccaggcgaggctgcagccagagggctgggaagggatcgcgctcgcggcatccagaggcggccaggcggaggcgagggagcaggttagagggacaaagagctttgcagacgtccccggcgtcctgcgagcgccagcggccgggacgaggcggccgggagcccgggaagagcccgtggatgttctgcgcgcggcctgggagccgccgccgccgccgcctcagcgagaggaggaatgcaccggccgcgccgccgcgggacgcgcccgccgctcctggcgctgctggccgcgctgctgctggccgcacgcggggctgctgcccaagaaacagagctgtcagtcagtgctgaattagtgcctacctcatcatggaacatctcaagtgaactcaacaaagattcttacctgacccttgatgaaccaatgaataacatcaccacgtctctgggccagacagcagaactgcactgcaaagtctctgggaatccacctcccaccatccgctggttcaaaaatgatgctcctgtggtccaggagccccggaggctctcctttcggtccaccatctatggctctcggctgcggattagaaacctcgacaccacagacacaggctacttccagtgcgtggcaacaaacggcaaggaggtggtttcttccactggagtcttgtttgtcaagtttggcccccctcccactgcaagtccaggatactcagatgagtatgaagaagatggattctgtcagccatacagagggattgcatgtgcaagatttattggcaaccgcaccgtctatatggagtctttgcacatgcaaggggaaatagaaaatcagatcacagctgccttcactatgattggcacttccagtcacttatctgataagtgttctcagttcgccattccttccctgtgccactatgccttcccgtactgcgatgaaacttcatccgtcccaaagccccgtgacttgtgtcgcgatgaatgtgaaatcctggagaatgtcctgtgtcaaacagagtacatttttgcaagatcaaatcccatgattctgatgaggctgaaactgccaaactgtgaagatctcccccagccagagagcccagaagctgcgaactgtatccggattggaattcccatggcagatcctataaataaaaatcacaagtgttataacagcacaggtgtggactaccgggggaccgtcagtgtgaccaaatcagggcgccagtgccagccatggaattcccagtatccccacacacacactttcaccgcccttcgtttcccagagctgaatggaggccattcctactgccgcaacccagggaatcaaaaggaagctccctggtgcttcaccttggatgaaaactttaagtctgatctgtgtgacatcccagcttgcgattcaaaggattccaaggagaagaataaaatggaaatcctgtacatactagtgccaagtgtggccattcccctggccattgctttactcttcttcttcatttgcgtctgtcggaataaccagaagtcatcgtcggcaccagtccagaggcaaccaaaacacgtcagaggtcaaaatgtggagatgtcaatgctgaatgcatataaacccaagagcaaggctaaagagctacctctttctgctgtacgctttatggaagaattgggtgagtgtgcctttggaaaaatctataaaggccatctctatctcccaggcatggaccatgctcagctggttgctatcaagaccttgaaagactataacaacccccagcaatggatggaatttcaacaagaagcctccctaatggcagaactgcaccaccccaatattgtctgccttctaggtgccgtcactcaggaacaacctgtgtgcatgctttttgagtatattaatcagggggatctccatgagttcctcatcatgagatccccacactctgatgttggctgcagcagtgatgaagatgggactgtgaaatccagcctggaccacggagattttctgcacattgcaattcagattgcagctggcatggaatacctgtctagtcacttctttgtccacaaggaccttgcagctcgcaatattttaatcggagagcaacttcatgtaaagatttcagacttggggctttccagagaaatttactccgctgattactacagggtccagagtaagtccttgctgcccattcgctggatgccccctgaagccatcatgtatggcaaattctcttctgattcagatatctggtcctttggggttgtcttgtgggagattttcagttttggactccagccatattatggattcagtaaccaggaagtgattgagatggtgagaaaacggcagctcttaccatgctctgaagactgcccacccagaatgtacagcctcatgacagagtgctggaatgagattccttctaggagaccaagatttaaagatattcacgtccggcttcggtcctgggagggactctcaagtcacacaagctctactactccttcagggggaaatgccaccacacagacaacctccctcagtgccagcccagtgagtaatctcagtaaccccagatatcctaattacatgttcccgagccagggtattacaccacagggccagattgctggtttcattggcccgccaatacctcagaaccagcgattcattcccatcaatggatacccaatacctcctggatatgcagcgtttccagctgcccactaccagccaacaggtcctcccagagtgattcagcactgcccacctcccaagagtcggtccccaagcagtgccagtgggtcgactagcactggccatgtgactagcttgccctcatcaggatccaatcaggaagcaaatattcctttactaccacacatgtcaattccaaatcatcctggtggaatgggtatcaccgtttttggcaacaaatctcaaaaaccctacaaaattgactcaaagcaagcatctttactaggagacgccaatattcatggacacaccgaatctatgatttctgcagaactgtaaaatgcacaacttttgtaaatgtggtatacaggacaaactagacggccgtagaaaagatttatattcaaatgtttttattaaagtaaggttctcatttagcagacatcgcaacaagtaccttctgtgaagtttcactgtgtcttaccaagcaggacagacactcggccag

SEQ ID NO: 1355 - DNA, 450 bp, Homo sapiens; identical to SEQ ID NO: 962

SEQ ID NO: 1356 - DNA, 735 bp, Homo sapiens
gagtctgcccttgcgagctcagagtgtgcccgtgcgccgccgccgtcgtacctgccgccgccgccaccgccaccatgcccaacttcgccggcacctggaagatgcgcagcagcgagaatttcgacgagctgctgaaggcactgggtgtgaacgccatgctgaggaaagtggccgtagcggctgcgtccaagccgcacgtggagatccgccaggacggggatcagttctacatcaagacatccaccaccgtgcgcaccactgagatcaacttcaaggtcggagaaggctttgaggaggagaccgtggacggacgcaagtgcaggagtttagccacttgggagaatgagaacaagatccactgcacccaaactcttcttgaaggggacggccccaaaacctactggacccgtgagctggccaacgatgaacttatcctgacgtttggcgccgatgacgtggtctgcaccagaatttatgtccgggaatgaaggcagctggcttgctcctactttcaggaagggatgcaggtccccgaggaatatgtcatagttctgagctgccagtggaccgcccttttcccctaccaatattaggtgatcccgttttccccatgacaatgttgtagtgtcccccacccccacccccctggccttggtgcctcttgtatccctagtgctgcatagcccggcatttgcacggtttcgaagtcattaaactggttagacgtgtctcaaa

SEQ ID NO: 1357 - DNA, 833 bp, Homo sapiens
cagaaattatccagcaaatctatcatggatcctaatcagaacgtgaaatgcaagatagttgtggtgggagacagtcagtgtggaaaaactgcgctgctccatgtcttcgccaaggactgcttccccgagaattacgttcctacagtgtttgagaattacacggccagttttgaaatcgacacacaaagaatagagttgagcctgtgggacacttcgggttctccttactatgacaatgtccgccccctctcttaccctgattcggatgctgtgctgatttgctttgacatcagtagaccagagaccctggacagtgtcctcaaaaagtggaaaggtgaaatccaggaattttgtccaaataccaaaatgctcttggtcggctgcaagtctgatctgcggacagatgttagtacattagtagagctctccaatcacaggcagacgccagtgtcctatgaccagggggcaaatatggccaaacagattggagcagctacttatatcgaatgctcagctttacagtcggaaaatagcgtcagagacatttttcacgttgccaccttggcatgtgtaaataagacaaataaaaacgttaagcggaacaaatcacagagagccacaaagcggatttcacacatgcctagcagaccagaactctcggcagttgctacggacttacgaaaggacaaagcgaagagctgcactgtgatgtgaatctttcattatctttaatgaagacaaaggaatctagtgtaaaaaacaacagcaaacaaaaaggtgagtctaaatgaagtgcacagccaaagtcatgtataccagaggcttaggaggcg

SEQ ID NO: 1358 - DNA, 2512 bp, Homo sapiens
caatgcactgacggatatgagtgggatcctgtgagacagcaatgcaaagatattgatgaatgtgacattgtcccagacgcttgtaaaggtggaatgaagtgtgtcaaccactatggaggatacctctgccttccgaaaacagcccagattattgtcaataatgaacagcctcagcaggaaacacaaccagcagaaggaacctcaggggcaaccaccggggttgtagctgccagcagcatggcaaccagtggagtgttgcccgggggtggttttgtggccagtgctgctgcagtcgcaggccctgaaatgcagactggccgaaataactttgtcatccggcggaacccagctgaccctcagcgcattccctccaacccttcccaccgtatccagtgtgcagcaggctacgagcaaagtgaacacaacgtgtgccaagacatagacgagtgcactgcagggacgcacaactgtagagcagaccaagtgtgcatcaatttacggggatcctttgcatgtcagtgccctcctggatatcagaagcgaggggagcagtgcgtagacatagatgaatgtaccatccctccatattgccaccaaagatgcgtgaatacaccaggctcattttattgccagtgcagtcctgggtttcaattggcagcaaacaactatacctgcgtagatataaatgaatgtgatgccagcaatcaatgtgctcagcagtgctacaacattcttggttcattcatctgtcagtgcaatcaaggatatgagctaagcagtgacaggctcaactgtgaagacattgatgaatgcagaacctcaagctacctgtgtcaatatcaatgtgtcaatgaacctgggaaattctcatgtatgtgcccccagggataccaagtggtgagaagtagaacatgtcaagatataaatgagtgtgagaccacaaatgaatgccgggaggatgaaatgtgttggaattatcatggcggcttccgttgttatccacgaaatccttgtcaagatccctacattctaacaccagagaaccgatgtgtttgcccagtctcaaatgccatgtgccgagaactgccccagtcaatagtctacaaatacatgagcatccgatctgataggtctgtgccatcagacatcttccagatacaggccacaactatttatgccaacaccatcaatacttttcggattaaatctggaaatgaaaatggagagttctacctacgacaaacaagtcctgtaagtgcaatgcttgtgctcgtgaagtcattatcaggaccaagagaacatatcgtggacctggagatgctgacagtcagcagtatagggaccttccgcacaagctctgtgttaagattgacaataatagtggggccattttcattttagtcttttctaagagtcaaccacaggcatttaagtcagccaaagaatattgttaccttaaagcactattttatttatagatatatctagtgcatctacatctctatactgtacactcacccataacaaacaattacaccatggtataaagtgggcatttaatatgtaaagattcaaagtttgtctttattactatatgtaaattagacattaatccactaaactggtcttcttcaagagagctaagtatacactatctggtgaaacttggattctttcctataaaagtgggaccaagcaatgatgatcttctgtggtgcttaaggaaacttactagagctccactaacagtctcataaggaggcagccatcataaccattgaatagcatgcaagggtaagaatgagtttttaactgctttgtaagaaaatggaaaaggtcaataaagatatatttctttagaaaatggggatctgccatatttgtgttggtttttattttcatatccagcctaaaggtggttgtttattatatagtaataaatcattgctgtacaacatgctggtttctgtagggtatttttaattttgtcagaaattttagattgtgaatattttgtaaaaaacagtaagcaaaattttccagaattcccaaaatgaaccagataccccctagaaaattatactattgagaaatctatggggaggatatgagaaaataaattccttctaaaccacattggaactgacctgaagaagcaaactcggaaaatataataacatccctgaattcaggcattcacaagatgcagaacaaaatggataaaaggtatttcactggagaagttttaatttctaagtaaaatttaaatcctaacacttcactaatttataactaaaatttctcatcttcgtacttgatgctcacagaggaagaaaatgatgatggtttttattcctggcatccagagtgacagtgaacttaagcaaattaccctcctacccaattctatggaatattttatacgtctccttgtttaaaatctgactgctttactttgatgtatcatatttttaaataaaaataaatattcctttagaagatcactctaaaa

SEQ ID NO: 1359 - DNA, 1673 bp, Homo sapiens
attcccccgcaggccgggcatgggtgggggcgccgggccgtcacgatgagcgccctgggcagcccggtccgggcctacgactttctgctcaagttcctgctggtgggcgacagcgacgtgggcaagggcgagatcctggcgagcctgcaggatggcgcggccgagtccccgtacggccacccggcgggcatcgactacaagacgaccaccatcctgctggacgggcggcgggtgaagctgcagctctgggatacttcaggccagggaagattttgtaccatattccgctcctactcccggggcgcacagggtgtgatcctggtctatgacattgcgaaccgctggtcttttgacggcattgatcgatggattaaggagatcgatgagcatgcccccggagtccccaagatcctggtggggaaccgcctgcacctggcgttcaagcggcaggtgcccacggagcaggcccaggcctacgccgagcgcctgggcgtgaccttctttgaggtcagccctctgtgcaatttcaacatcacagagtcgttcacggagctggccaggatcgtgctgctgcggcatgggatggaccggctctggcggccgagcaaggtgctgagcttgcaagacctctgctgccgggcggtcgtgtcctgcacgccggtgcacctggtggacaagctcccgctccccattgccttaagaagccacctcaagtccttctcgatggccaacggcctgaatgccaggatgatgcacggcggttcctactccctcaccaccagctccacccacaaaaggagcagcctccgcaaagtgaagctcgtccgccccccccagagcccccccaaaaactgcaccagaaacagctgcaaaatttcttaaggaaggcactgaaagaaacacggcggaatctctccaggagaagctcggcgttacccccggcagctggtggatgcatctcagatcccggttcctctcggcgaatgctgcttgcgaatgtgtgcgacgccttccgtgtgatggaaacacactaccccgtcggacttcgaatttctacgtggatgtgcatgaagctcttgttttcgatgtgtgtttgtaaagggaaaattagtactctgctcgactcttggtaacatgaaattctgaatgttactttatcatgattgcactgcaacttttttccttaaaataactgcttttgtaagaacggtgatattggagtgattagtataaattcaatggaatttgagaagcaatggcagcgggataatttagagtcactgatattacgagaggggtctttttgtaaacctccttttcaatgtcaaagcaccaatttataaaacgctgcagatgtagaggttatgtgcaactgatctgtccagtttgtgtatgaaatggatttgataaagtttttgctagttatttactacattttgggattaataagtgatttatatgcatatttttctgtaaatctacagttttttgtacaagatattctacaagttatgaagctaagggaagaaaatgccaaagatacctctagttatgttgaacacagccagcacagtttcgacaggtcaaggaagagctgtttcagtaaagaatgaagtgaaaacacttatttaggaaaatgtttctcaacaataaaatgtatagttgtttctctc

SEQ ID NO: 1360 - DNA, 3505 bp, Homo sapiens
cgccgcctgcccgcccgcccgctcgcccccggtccggactcctcctcctcctcttctcgcattgcagttgaacccagcagcccgccccaccggtggcttttgggggcagaccccggcggctgtggcaggagggcggcggcggcggctgcggtcgaagaaggggacgccgacaagagttgaagtattgataacaccaaggaactctatcacaatttgaaaagataagcaaaagtttgatttccagacactacagaagaagtaaaaatgcgtccaatgcgaatttttgtgaatgatgaccgccatgtgatggcaaagcattcttccgtttatccaacacaagaggagctggaggcagtccagaacatggtgtcccacacggagcgggcgctcaaagctgtgtccgactggatacacgagcaggaaaagggtagcagcgagcaggcagagtccgataacatggatgtgcccccagaggacgacagtaaagaaggggctggggaacagaagacggagcacatgaccagaacctgtcggggagtgatgcgggctgggcctggtggccaaagtgcctcctactcaagggggacttggatctggagctggtgctgctgtgtaaggagaagcccacaaccggccctcctggacaaggtggccgacaacctggccatccagcttgctgctgtaacagaagacaagtacgaaatactgcaatctgtcgacgatgctgcgattgtgataaaaaacacaaaagagcctccattgtccctgaccatccacctgacatcccctgttgtcagagaagaaatggagaaagtattagctggagaaacgctatcagtcaacgaccccccggacgttctggacaggcagaaatgctttgctgccttggcgtccctccgacacgccaagtggttccaggccagagccaacgggctgaagtcttgtgtcattgtgatccgggtcttgagggacctgtgcactcgcgtgcccacctggggtcccctccgaggctggcctctcgagctcctgtgtgagaaatccattggcacggccaacagaccgatgggtgctggcgaggccctgcggagagtgctggagtgcctggcgtcgggcatcgtgatgccagatggttctggcatttatgacccttgtgaaaaagaagccactgatgctattgggcatctagacagacagcaacgggaagatatcacacagagtgcgcagcacgcactgcggctcgccgcgttcggccagctccataaagtcctaggcatggaccctctgccttccaagatgcccaagaaaccaaagaatgaaaacccagtggactacaccgttcagatcccaccaagcaccacctatgccattacgcccatgaaacgcccaatggaggaggacggggaggagaagtcgcccagcaaaaagaagaagaagattcagaagaaagaggagaaggcagagcccccccaggctatgaatgccctgatgcggttgaaccagctgaagccagggctgcagtacaagctggtgtcccagactgggcccgtccatgcccccatctttaccatgtctgtggaggttgatggcaattcattcgaggcctctgggccctccaaaaagacggccaagctgcacgtggccgttaaggtgttacaggacatgggcttgccgacgggtgctgaaggcagggactcgagcaagggggaggactcggctgaggagaccgaggcgaagccagcagtggtggcccctgccccagtggtagaagctgtctccacccctagtgcggcctttccctcagatgccactgccgagaacgtaaaacagcaggggccgatcctgacaaagcacggcaagaacccagtcatggagctgaacgagaagaggcgtgggctcaagtacgagctcatctccgagaccgggggcagccacgacaagcgcttcgtcatggaggtcgaagtggatggacagaagttccaaggtgctggttccaacaaaaaggtggcgaaggcctacgctgctcttgctgccctagaaaagcttttccctgacacccctctctcgcccttgatgccaacaaaaagaagagagccccagtacccgtcagagggggaccgaaatttgctgctaagccacataaccctggcttcggcatgggaggccccatgcacaacgaagtgcccccaccccccaaccttcgagggcggggaagaggcgggacgatccggggacgagggcgcgggcgaggatttggtggcgccaaccatggaggctacatgaatgccggtgctgggtatggaagctatgggtacggaggcaactctgcgacagcaggctacagtcagttctacagcaacggagggcattctgggaatgccagtggcggtggcggcgggggcggtggtggctcctccggctatggctcctactaccaaggtgacaactacaactcaccggtgcccccaaaacacgctgggaagaagcagccgcacgggggccagcagaagccctcctacggctcgggctaccagtcccaccagggccagcagcagtcctacaaccagagcccctacagcaactatggccctccacagggcaagcagaaaggctataaccatggacaaggcagctactcctactcgaactcctacaactctcccgggggcgggcgcggatccgactacaactacgagagcaaattcaactacagtggtagtggaggccgaagcggcgggaacagctacggctcaggcggggcatcctacaacccagggtcacacgggggctacggcggaggttctgggggcggctcctcataccaaggcaaacaaggaggctgctcacagtcgaactacagctcccggggtccggccagaactacagtggccctcccagctcctaccagtcctcacaaggcggctatggcagaaacgcagaccacagcatgaactaccagtacagataagccccgcgcggagatttctaccttctgcacttactccccatcagaagatcgagttttatgcatcacagttaacatgtcagctgcctgcgctccaggcccccgcccccatcccgtccacgttgctgtgtcgtgaggtgcagcgggtcaccctgtggcccgtcctgtgacccatatttagccgtgtttgggactccgtgtcttcaatggtttgttagttgccattacaactttgtctgggtagagtttttgagtttttgcagttcagtatccctctgtctattcacacttcgtgttagtggtaactcagtttgtctttaaatagttacagaagggatacgtcatttgttaatgctttttgttgaagtgagttaaacgagcttttctgtattttaatgctttagtgtttcagttttataagtgaagattttattttaaaaaccagtgggaaagagtggggggtttctttttatgtctgggtcattcaggcagtacatctgaattaagctgaatgtagacaaataaagaaaaacaaaactgaaa

SEQ ID NO: 1361 - DNA, 2330 bp, Homo sapiens; identical to SEQ ID NO: 964

SEQ ID NO: 1362 - DNA, 2156 bp, Homo sapiens
ttcgtgctttgcggcgggcgccggcgctggcggccgtgccgggaggaaaaccaattctgtgtcctcggaggaccacagcccagttgggccccaggcgaaacccagcctggagcttgcaggcaggacgactgttcagcacgcagaccgccgaggacaaggaggaacccctgcactcgattatcagcagcacagagagcgtgcagggttccacttccaaacatgagttccaggccgagacaaagaagcttttggacattgttgcccggtccctgtactcagaaaaagaggtgtttatacgggagctgatctccaatgccagcgatgccttggaaaaactgcgtcacaaactggtgtctgacggccaagcactgccagaaatggagattcacttgcagaccaatgccgagaaaggcaccatcaccatccaggatactggtatcgggatgacacaggaagagctggtgtccaacctggggacgattgccagatcggggtcaaaggccttcctggatgctctgcagaaccaggctgaggccagcagcaagatcatcggccagtttggagtgggtttctactcagctttcatggtggctgacagagtggaggtctattcccgctcggcagccccggggagcctgggttaccagtggctttcagatggttctggagtgtttgaaatcgccgaagcttcgggagttagaaccgggacaaaaatcatcatccacctgaaatccgactgcaaggagttttccagcgaggcccgggtgcgagatgtggtaacgaagtacagcaacttcgtcagcttccccttgtacttgaatggaaggcggatgaacaccttgcaggccatctggatgatggaccccaaggatgtcggtgagtggcaacatgaggagttctaccgctacgtcgcgcaggctcacgacaagccccgctacaccctgcactataagacggacgcaccgctcaacatccgcagcatcttctacgtgcccgacatgaaaccgtccatgtttgatgtgagccgggagctgggctccagcgttgcactgtacagccgcaaagtcctcatccagaccaaggccacggacatcctgcccaagtggctgcgcttcatccgaggtgtggtggacagtgaggacattcccctgaacctcagccgggagctgctgcaggagagcgcactcatcaggaaactccgggacgttttacagcagaggctgatcaaattcttcattgaccagagtaaaaaagatgctgagaagtatgcaaagttttttgaagattacggcctgttcatgcgggagggcattgtgaccgccaccgagcaggaggtcaaggaggacatagcaaagctgctgcgctacgagtcctcggcgctgccctccgggcagctaaccagcctctcagaatacgccagccgcatgcgggccggcacccgcaacatctactacctgtgcgcccccaaccgtcacctggcagagcactcaccctactatgaggccatgaagaagaaagacacagaggttctcttctgctttgagcagtttgatgagctcaccctgctgcaccttcgtgagtttgacaagaagaagctgatctctgtggagacggacatagtcgtggatcactacaaggaggagaagtttgaggacaggtccccagccgccgagtgcctatcagagaaggagacggaggagctcatggcctggatgagaaatgtgctggggtcgcgtgtcaccaacgtgaaggtgaccctccgactggacacccaccctgccatggtcaccgtgctggagatgggggctgcccgccacttcctgcgcatgcagcagctggccaagacccaggaggagcgcgcacagctcctgcagcccacgctggagatcaaccccaggcacgcgctcatcaagaagctgaatcactgcgcgcaagcgagcctggcctggctcagctgctggtggatcagatatacgagaacgccatgattgctgctggacttgttgacgaccctagggccatggtgggccgcttgaatgagctgcttgtcaaggccctggagcgacactgacagccagggggccagaaggactgacaccacagatgacagccccacctccttgagctttatttacctaaatttaaaggtatttctt

SEQ ID NO: 1363 - DNA, 1592 bp, Homo sapiens
ggcacgagtcgaagagctcctggacgcagaggccctgcccttgccagacggcgcagacatgtcagaacaaagtaaggatctgagcgaccctaactttgcagccgaggcccccaactccgaggtgcacagcagccctggggtttcggagggggttcctccgtccgcgaccctggcagagccgcagagccctcctctaggcccgacggccgctccgcaggccgcgccgcctccccaggccccgaacgacgagggcgacccgaaggccctgcagcaggctgcggaggagggccgcgcccaccaggccccgagcgcggcccagccgggcccggcaccgccagccccggcgcagctggtgcagaaggcgcacgagctcatgtggtacgtgctggtcaaggaccagaagaagatgatcatctggtttccagacatggtgaaagatgtcatcggcagctacaagaagtggtgcaggagcatcctccggcgcaccagcctcatcctcgcccgggtgttcgggctgcacctgaggctaaccagcctgcacaccatggagtttgcgctggtcaaagcgctggagcccgaggagctggacagggtggcgctgagcaaccgcatgcccatgacaggcctcctgctcatgatcctgagcctcatctacgtgaagggccgcggcgccagagagagcgccgtctggaacgtgctgcgcatcctggggctgcggccctggaagaagcactccaccttcggggacgtgcggaagctcatcactgaggagttcgtccaaatgaattacctgaagtaccagcgcgtcccatacgtggagccgcccgaatacgagttcttttggggctcccgggccagccgcgaaatcaccaagatgcaaatcatggagttcctggccagggtctttaagaaagacccccaggcctggccctcccgatacagagaagctctggaggaggccagagctctgcgggaggctaatcccactgcccactaccctcgcagcagtgtctctgaggactagcaaagtctggaggcagatgaatggtttctgaccctcaccagggctgtggaagggtgggggtgggtcattatagtattcaggatttacagtgcagtattcacgtgtaacttttaagttttcagtacagtgcttttatacctttaatgcaatgttgtattcatttgggtactattgtgtagtatttaggatgtatgcatgtttgtttatatgtaagcttggttggtgctttcgcttttgtgctacctttcttggatttttgtaccagagatgtgctaaactgatgaaatacattgagaaagtttccatcttattcttttatatgggactgatgatgtgtgttggggtagactgctcctgcagagtttggaagaagtcaccagcaaagccggcctaaccaagaaaagtcaaggcccttcatgaccttgctgggcacagaaaacaccctcgtggagtacactaatttgaactggactggtctcagtgtgagcacttggcacactttactaaacacatatacaaccccaccgtgagtcaactttaaagtaaacattaaagattcttgtgatac

SEQ ID NO: 1364 - DNA, 1303 bp, Homo sapiens; identical to SEQ ID NO: 966

SEQ ID NO: 1365 - DNA, 662 bp, Homo sapiens
ccccagccatggagcaagacaacagcccccgaaagatccagttcacggtcccgctgctggagccgcaccttgaccccgaggcggcggagcagattcggaggcgccgccccacccctgccaccctcgtgctgaccagtgaccagtcatccccagagatagatgaagaccggatccccaacccacatctcaagtccactttggcaatgtcgccacggcaacggaagaagatgacaaggatcacacccacaatgaaagagctccagatgatggttgaacatcacctggggcaacagcagcaaggagaggaacctgagggggccgctgagagcacaggaacccaggagtcccgcccacctgggatcccagacacagaagtggagtcaaggctgggcacctctgggacagcaaaaaaaactgcagaatgcatccctaaaactcacgagagaggcagtaaggaacccagcacaaaagaaccctcaacccatataccaccactggattccaagggagccaactcggtctgagagaggaggaggtatcttgggatcaagactgcagtttgggaatgcatggacaccggatttgtttcttattccttcacttttggggaaaatctcttgtttttaaaaagtgataaatttggtgttaggtcaaaaaaaaaa

SEQ ID NO: 1366 - DNA, 1234 bp, Homo sapiens
cgctgctcttggttctggttctggaggctgggttgagaggtcgccggtccgactgtcctcggcggttggtcagtgtgaatttgtgacagctgcagttgctccccgcccccgagcagccgaggagtctaccatggctcaagaatctcccaaaaattcagcagcagaaattccagtgactagtaatggagaagttgatgactctcgtgaacatagctttaatagggatttgaagcattcattaccatctggacttggtctctcagaaacccaaattacatctcatggctttgacaataccaaagagggtgttattgaagcaggagcatttcaaggtggccagagaacacagacaaaaagtggaccagttattctagcagatgaaattaaaaatcctgcaatggaaaagttagaacttgttagaaaatggagtctaaacacctataagtgtactcgacagattatctctgagaagctaggccgtggctcaagaactgtggaccttgaacttgaagctcagattgatatattaagggataacaagaaaaaatatgaaaatattttaaaactggctcaaacattgtcgacccagcttttccagatggtacatacccaaaggcaacttggagatgcatttgctgacctgagtttgaagtcactagaacttcatgaagaatttggctataatgccgatacccagaaactgctggctaaaaatggagagactcttcttggggccattaattttttcattgctagtgtgaacactttggtgaataaaaccattgaagatacattaatgactgtgaaacagtatgaaagtgccaggattgaatatgatgcatatcgcactgatttggaagaactgaatcttggaccacgtgacgcaaacactctgccaaagattgagcagtcacagcatctcttccaagcacataaggaaaaatatgataaaatgcgcaatgatgtttctgtcaaattgaaatttctagaagaaaataaggttaaagtattgcacaatcagctggtccttttccacaatgccattgccgcttactttgctgggaatcagaagcagcttgaacagacacttaaacagttccatatcaaattgaaaacccctggagtggatgccccatcttggcttgaagaacagtaaaatcacagcggaaaataaaaagaaagtcgcgttgttatatttctaaaccaacctaacaagaattaagcagagttgggc

SEQ ID NO: 1367 - DNA, 853 bp, Homo sapiens; identical to SEQ ID NO: 970

SEQ ID NO: 1368 - DNA, 1842 bp, Homo sapiens
tacctcatccacctcttccatacctttacaggcctctcaattgcttattttaactttggaaaccagctctaccactccctgctgtgtattgtgcttcagttcctcatccttcgactaatgggccgcaccatcactgccgtcctcactaccttttgcttccagatggcctaccttctggctggatactattacactgccaccggcaactacgatatcaagtggacaatgccacattgtgttctgactttgaagctgattggtttggctgttgactactttgacggagggaaagatcagaattccttgtcctctgagcaacagaaatatgccatacgtggtgttccttccctgctggaagttgctggtttctcctacttctatggggccttcttggtagggccccagttctcaatgaatcactacatgaagctggtgcagggagagctgattgacataccaggaaagataccaaacagcatcattcctgctctcaagcgcctgagtctgggccttttctacctagtgggctacacactgctcagcccccacatcacagaagactatctcctcactgaagactatgacaaccaccccttctggttccgctgcatgtacatgctgatctggggcaagtttgtgctgtacaaatatgtcacctgttggctggtcacagaaggagtatgcattttgacgggcctgggcttcaatggctttgaagaaaagggcaaggcaaagtgggatgcctgtgccaacatgaaggtgtggctctttgaaacaaacccccgcttcactggcaccattgcctcattcaacatcaacaccaacgcctgggtggcccgctacatcttcaaacgactcaagttccttggaaataaagaactctctcagggtctctcgttgctattcctggccctctggcacggcctgcactcaggatacctggtctgcttccagatggaattcctcattgttattgtggaaagacaggctgccaggctcattcaagagagccccaccctgagcaagctggccgccattactgtcctccagcccttctactatttggtgcaacagaccatccactggctcttcatgggttactccatgactgccttctgcctcttcacgtgggacaaatggcttaaggtgtataaatccatctatttccttggccacatcttcttcctgagcctactattcatattgccttatattcacaaagcaatggtgccaaggaaagagaagttaaagaagatggaataatccatttccctggtggcctgtgcgggactggtgcagaaactactcgtctcccttttcacagcactcctttgccccagagcagagaatggaaaagccagggaggtggaagatcgatgcttccagctgtgcctctgctgccagccaagtcttcatttggggccaaaggggaaacttttttttggagaaggcgtcttgctttgtcacccacgctggaatgcagtggcgggatctcagctcaccgcaacctccacctcctgggttcaagtgattttcctgcctcagcctcccaagtagctgggaatacaggcacgccaccatgcccagctaatttttgtattttcagtagaaacgggatttcaccacgttggccaggctggtctcgaactcctgaccgcaagtgatccacccgcctccgcctcccaaagtgctgggattacaggcgtgagccaccgtgcccggcccaaaggggaaactcttgtgggaggagcagaggggctcacatctcccctctgattcccccatgcacattgccttatctctccccatctagccaggaatctattgtgtttttcttctgcc

SEQ ID NO: 1369 - DNA, 990 bp, Homo sapiens; identical to SEQ ID NO: 973

SEQ ID NO: 1370 - DNA, 1648 bp, Homo sapiens
tggccgacacccgcagggacgcccgccggacgagcacgcggagggccctcgcctccacggatgcaccatgccggtgtgaggagcatctgttcttcccactctctgcagttaacaaacccaacccaaaccaccacaggtgctcctcctggggagtttcctgtctgacaaatgccaggctcacttcaaggagaatcacgcttctttctaaagatggattcaccatttaaaacagagctctgggagcctttcggcaaatcttgaaagctgcacggtgcagagacatggatgtgacttcccaagcccggggcgtgggcctggagatgtacccaggcaccgcgcagcctgcggcccccaacaccacctcccccgagctcaacctgtcccacccgctcctgggcaccgccctggccaatgggacaggtgagctctcggagcaccagcagtacgtgatcggcctgttcctctcgtgcctctacaccatcttcctcttccccatcggctttgtgggcaacatcctgatcctggtggtgaacatcagcttccgcgagaagatgaccatccccgacctgtacttcatcaacctggcggtggcggacctcatcctggtggccgactccctcattgaggtgttcaacctgcacgagcggtactacgacatcgccgtcctgtgcaccttcatgtcgctcttcctgcaggtcaacatgtacagcagcgtcttcttcctcacctggatgagcttcgaccgctacatcgccctggccagggccatgcgctgcagcctgttccgcaccaagcaccacgcccggctgagctgtggcctcatctggatggcatccgtgtcagccacgctggtgcccttcaccgccgtgcacctgcagcacaccgacgaggcctgcttctgtttcgcggatgtccgggaggtgcagtggctcgaggtcacgctgggcttcatcgtgcccttcgccatcatcggcctgtgctactccctcattgtccgggtgctggtcagggcgcaccggcaccgtgggctgcggccccggcggcagaaggcgctccgcatgatcctcgcggtggtgctggtcttcttcgtctgctggctgccggagaacgtcttcatcagcgtgcacctcctgcagcggacgcagcctggggccgctccctgcaagcagtctttccgccatgcccaccccctcacgggccacattgtcaacctcaccgccttctccaacagctgcctaaaccccctcatctacagctttctcggggagaccttcagggacaagctgaggctgtacattgagcagaaaacaaatttgccggccctgaaccgcttctgtcacgctgccctgaaggccgtcattccagacagcaccgagcagtcggatgtgaggttcagcagtgccgtgtagacagccttggccgcataggcccagccagggtgtgactcgggagctgcacacacctgggtggacacaaggcacggccacgtcatgtctctaaactgcggtcagatgtggcttctggctcctcggggcctcgcgagggtcacgcttgcctggtcaccctggggctgcttaagaaacctcacgactggtcaccttgcactcctcacacagaattgctacaatcccaaagcgctcgccccgca

SEQ ID NO: 1371 - DNA, 1440 bp, Homo sapiens
gtgatgcccatctcatatcagccagggacaaagcaactccttgttcatcccagcttggcttttgatccgtgcccatgcctggttcatgccttggacacataggtttcctttaaagaggtggtattgtagccagcttatatttgcatctatagccatgtttctagtccagcttggtgtgcaatactagatgagttaataactggtccttgtttctgatctggttcccattgtgtaactgtgttgattgggaaggtagtttgtgagccatgaaatgcttggttcattggttgcttattgacctcattaacctaggacttgaatatcccaaagggtatgctctttaccacattcaactcctaatttatttgtttaggttatgatgtgattgctcaagcccaatctgggactgggaaaacggccacatttgccatatcgattctgcagcagattgaattagatctaaaagccacccaggccttggtcctagcacccactcgagaattggctcagcaggtaagagtggcttctattccctccttcagggctgatttagggatgatgagtataatccaaggaccagagaagtcttctctgatcaccaccttgggaggaagacatgggtgccctaacactctcgagacctgctgggttaattaaaagctatttcttacccaaacgtaaccattgcttcctccacccatttcctgagtcaaatgggaaagctgttgggtgaagcctggctggctgggcaagtttgactgtgttctgaataagcaccttcactatgggctaagagatcccttggtgtgggggtgatcttacagtagtcagagcagatggacagtccttttcacccttgcttaatagccagagctgtttcatgcctggggcacacacaattctaatgctggactttttcctgggtcatgctgcaacactgatgtcagagcatgtttttaaatgttctgtggcaggggcagtgattattctgggtgtggataatgtaagaagttacagcagagctccattctaaggcacttggctctcagttttctcagagtgaacatgcctcgtagcttgggtcctatggcaggagtgcaataggacatggatatgcatcacctgttctataaaactggttgctggctgggcgcggtggctcaactcgtataatcccaacactttgggaggccaaggcaggcagatctcttgagatcaggagttggagaccagcctggccaacatagtgaaaccccgcttctactaaaaatacaaaaattagccaggcatggtggcgtgtgccttttatcccagctactcgggaagctcaggcaggagaatttaacccaggaggtggaggttgcagtgagctgagattgtgccattgcactccagcctgggcaacgagcaaagctctgtctcaaaaaaaaaaaaaaaaaa

SEQ ID NO: 1372 - DNA, 1529 bp, Homo sapiens
cgggaagttgacgggcatcagtgaccccgtgactgtcaagacctccggctcgaggttcggatcctggatgacagaccctctcgcccctgaaggcgataaccgggtgtggtacatggacggctatcacaacaaccgcttcgtacgtgagtacaagtccatggttgacttcatgaacacggacaatttcacctcccaccgtctcccccacccctggtcgggcacggggcaggtggtctacaacggttctatctacttcaacaagttccagagccacatcatcatcaggtttgacctgaagacagagaccatcctcaagacccgcagcctggactatgccggttacaacaacatgtaccactacgcctggggtggccactcggacatcgacctcatggtggacgagagcgggctgtgggccgtgtacgccaccaaccagaacgctggcaacatcgtggtcagtaggctggaccccgtgtccctgcagaccctgcagacctggaacacgagctaccccaagcgcagcgccggggaggccttcatcatctgcggcacgctgtacgtcaccaacggctactcagggggtaccaaggtccactatgcataccagaccaatgcctccacctatgaatacatcgacatcccattccagaacaaatactcccacatctccatgctggactacaaccccaaggaccgggccctgtatgcctggaacaacggccaccagatcctctacaacgtgaccctcttccacgtcatccgctccgacgagttgtagctccctcctcctggaagccaagggcccacgtcctcaccacaaaggaactcctgtgaaactgctgccaaaaagataccaataacactaacaataccgatcttgaaaaatcatcagcagtgcggattctgacatcgagggatggcattacctccgtgtttctccctttcgagccggcgggccacagacgtcggaagaaactcccgtatttgcagctggaactgcagcccacggcgccccggttttcctccccgccctgtccctctctggtcaaacaacatactaaagaggcgaggcaatgactgttggccagttctcaccggggaaaaacccactgttaggatggcatgaacatttccttagatcgtggtcagctccgaggaatgtggcatccaggctctttgagagccatgggctgcacccggccgtaggctagtgtaactcgcatcccattgcagtgccgtttcttgactgtgttgctgtctcttagattaaccgtgctgaggctccacatagctcctggacctgtgtctagtacatactgaagcgatggtcagagggtgtagagtgaagttgctgtgcccacattgtttgaactcgcgtaccccgtagatacattgtgcaacgttcttctgttattcccttgaggtggtaacttcgtatgttcagtttatgcgatgattgttgtaaatgcaatgccgtagtttggattaataagtggatggtttttgtttctaaaaaaaaaaaaaaaaaa

SEQ ID NO: 1373 - DNA, 6694 bp, Homo sapiens
aagcttgcatgcaggccacgccccggagagtcacgtagctctgcgacatccgcagcctcatttaccagagggagccagggctgcagctcatctgtttgcggatcaagaacccgagctgtgcttgtggctgcggctgctaactggctgcgcacaggtaaggccaggcaaggcgggaccgactcaacatcttccgcttcatttccttggcctcttcccctgccatcctcgtcctgctacctgggactccgggatgtgccctttcgaccctttcctaacatctttgctcctttccgcgtacttgaaaccccatggctcaacctcttctgttctatccctcttcagctctcccagctggacctcagcttttccaatcccaaatcctcctctacttgttggatttttccttggagtctgtctctcctacccagagcatttccttctcagcctgctccctctcctcctaggctaggtcctctctccagttctcccgccttctctgccccccggtctaggtctctcccgctgactggttagcctgcatcaccactagctcccctcagtctcatctctctctcaggctctctactcctttcagccttggtcctctgccctcccgtctgggtgtctagattgtggggaattgaagtgcttcctattgctatcctcctgccaaacaggtgaagtgcttcctgggcacagagatgacccggaggtgtcactagccctagtctccacacactaacacagctgacccgctgggccctctttcctacatcactgcagccccactggggccaacctctggtactgggtgggaataggcaataggcataggcaggcaggtttggagtacagaaaaggagaagctgcaggagcctgtgactggtatttgtgccactcctactccctacctgttcttccaaccttttcctctagaagctgagagaagagggtggcaataagtacttttgcctcattctgaagccttggaagtaagtacactttcctaggggtcctgtggaggatgagaaaagggaagctggaaaggccaggacttttgcctacctcaacaagggaccaagttcagtgaaagaagggttggcatccttgattgggcagcagatttatcagaagagctgtggcttcagggctgctcacctccccacccccaccctgcatctttccccagggctgggaaggatgcctaccagggacaaaaggagatgtgggaactggagccctaagcttgctagctgtcagaaggactggtgccacttgatgcccaggactcatgccaaggactgctgccctgttcccagccccttgcttgatggggaggccatttggcccatctggccaggagaggcagcagagggtgaggtctggcttttttatcttgtctccactccagggagctgtcaccatgcctcactcgtacccagccctttctgctgagcagaagaaggagttgtctgacattgccctgcggattgtagccccgggcaaaggcattctggctgcggatgagtctgtaggtaagtggacatctgtagccaggtagggtacaggtggctaggggaccctggggatgttctcactgcctctctttgtttgcccctaggcagcatggccaagcggctgagccaaattggggtggaaaacacagaggagaaccgccggctgtaccgccaggtcctgttcagtgctgatgaccgtgtgaaaaagtgcattggaggcgtcattttcttccatgagaccctctaccagaaagatgataatggtgttcccttcgtccgaaccatccaggataagggcatcgtcgtgggcatcaaggtgcagcccctggccctgctctgaatggaagctgggtgtgaaaataagcttgtgtaggaggggtagcaaggagaatcctgcctggattcaaccctctgcttgtacttcctctacaggttgacaagggtgtggtgcctctagctgggactgatggagaaaccaccactcaaggtataggatgggtgggcttgaggaccaaagaggtgttagatagttgatgctggtaaaagaggggcagagtaatgaggttggcactgtgcttgcagggctggatgggctctcagaacgctgtgcccaatacaagaaggatggtgctgactttgccaagtggcgctgtgtgctgaaaatcagtgagcgtacaccctctgcacttgccattctggagaacgccaacgtgctggcccgttatgccagtatctgccagcaggtgtgtgtgttgggagggtggtgagctaggtgccctgtatgcctggtggggagagagtcacaaggctttcttcatctcccctactgcccctcccaagcatctctgctcttgcctgcagaatggcattgtgcctattgtggaacctgaaatattgcctgatggagaccacgacctcaaacgttgtcagtatgttacagagaaggtgagtccacacctgggcacacaaacatactgcagggacagctcggcaggagtgtctgttccccagaacccccagcttagatccaggcacactttcccctagcactttttcacttcatcccggcacaggcctgtgatctgagcctgtactgagccctcacagtctgtgcccatctacccctacatagggagcatcgagcagtaaccagtgggggcccagacccttagtaaacctcctctaatccccacccaggtcttggctgctgtgtacaaggccctgagtgaccatcatgtatacctggaggggaccctgctcaagcccaacatggtgaccccgggccatgcctgtcccatcaagtataccccagaggagattgccatggcaactgtcactgccctgcgtcgcactgtgcccccagctgtcccaggtactacccagctccctaacctgctcctatccctaaggcccatcttcaggtccttcttgtggccttcaggggttccctatcctggaaaaattgggagtgaccagtcagtttgtcttctctcctccacactaggagtgaccttcctgtctgggggtcagagcgaagaagaggcatcattcaacctcaatgccatcaaccgctgcccccttccccgaccctgggcgcttaccttctcctatgggcgtgccctgcaagcctctgcactcaatgcctggcgagggcaacgggacaatgctggggctgccactgaggagttcatcaagcgggctgaggttgggagctacaggtggtggtgggtgggggcagcacccagaggctatagcctgggcagggcttggcacctgtgggctggctcagcctgcttactccacgctcccttttgcaggtgaatgggcttgcagcccagggcaagtatgaaggcagtggagaagatggtggagcagcagcacagtcactctacattgccaaccatgcctactgagtatccactccataccacagcccttggcccagccatctgcacccacttttgcttgtagtcatggccagggccaaatagctatgcagagcagagatgccttcacctggcaccaacttgtcttcctttctctcttcccttcccctctctcattgctgcacctgggaccataggatgggaggatagggagcccctcatgactgagggcagaagaaattgctagaagtcagaacaggatggctgggtctccccctacctcttccagctcccacaattttcccatgatgaggtagcttctccctgggctctccttcttgcctgccctgtctcctgggatcagagggtagtacagaagccctgactcatgccttgagtacataccatacagcaaataaatggtagcaaaacattctactttgcctgtctgttttacacatcaaattcccacctcccagtttctgatctctgctaattctatctctgggccctctgactctggaggtggagagggtgggatttgagtcttactgggcttcaagttatggaggaagggcacatgcagtcaccatccccagctcaggctcttgctctcttgatgtccaagtctggagtggggcaatgaggaagactgcaagtcttctagggactcgcacatcagtggcactgggctgcagctacagaagtatggagtgaggccaaactggcaactcctgaaggcagatttgtgcaaggctcaaagcagggaggcagcaagacaggctgggataagagtgggtgggagtctctcccatctcgcagtgttaagcccagctgggacctggtaccgcccagctgggacctggtaccttccactagggtgagccacaccagtaagggcaagcgagcacctggactcccgcccaaagaggaaaaccaaggctctgcgggctgccagggctgagcagggcatctaggaggttgccaagggctatggccattttcatttggggtagaagtgggcacaaagggagccaattggagggtctgggtaaggacagctctggtgaggcctgatgctgaactttgaccactgggctgggttgtgaggtaggctgagaacctgggtctaagcagataaaaagaagagataacaagctgcgtgtgttctgtgtcaactggggaggctacaaatgctccaccctgtgtggcctgactttataataacaaaaatagcttgcacatagcaccaaccctgttctaatcactttatatgtactgacacatttcatacaactctataaagtaggtactattactatcatccctattttaatagagaaaacaggcacagataggcacagaacgatcttctcacgatcactcacctaataagtgatgaagccaggatttgaaccgcagtgatcagcatctagagtctgggctcatgacttttcaagatttttaagtgaagtattctgagttttccaagttggaaatgaattaaaacgtattttaaaatagcgagagaggccaattgtgctaaaacatactagcttgctacctccgtgtttgaggctttgaggagagggcaccctaagaggagttctacgataaggataataagaccgtgacagttgacgttgagggctttccgtgtgccaggctccttacaagaacggcctcatttatgtaaatatctccattttcagatgagcctcggagctgcctgtagttgcccagctagtatttaaggactgcagaggttgcgctcttgattgcggggctagaagtgtgttctacagggaagcggggaacttcgttccagcagcgccgaaacccgcacggcccctaggctgtccctccgcgcccgggtgacttcctttcagatccccagcgaagctcccagcggagccctcccacccctcgcccgcttgctcccgtctgcgggtctggagtagcgctcgcgattggccccgatcaccgccgcggtcctgccccctcgttgcagagattccgattgggtgaggctcacgaagctctgcccccacggtggccggagcagccggaagctagcatggcggccgccggggctgcggctacacacctaggtgcggtgggcttcgggtggggggcctgcagctagctgatggcaagggaggaatagcaggggtggggattgtggtgtgcgagaggtcccgcggacggggggctcgggggtctcttcagacgagattcccttcaggcttgggccgggtcccttcgcacggagatcccaatgaacgcgggcccctggaggccggtggttggggcttctccgcgtcggggatggggccggtaccctagcccgtttccagcgcctcagtcggttccccatgccctcagaggtggcccggggcaagcgcgccgccctcttcttcgctgcggtggccatcgtgctggggctaccgctctggtggaagaccacggagacctaccgggcctcgttgccttactcccagatcagtggcctgaatgcccttcaggtgagactgctgtgcgggagggtcgggggacagcccccccggcaaggtggagactcagtgacggccctgatgctccttcctgtagctccgcctcatggtgcctgtcactgtcgtgtttacgcgggagtcagtgcccctggacgaccaggagaagctgcccttaccgttgtgcatgaaagagagattcctctgaaatgtgagttactggggatcagggctgcttttcgcctctgagctcagttcagagctgagttgggtgggaggagcgggggtgtaccataaacgcagttaaaaacttactgttgaaagacctctgaatgaacagtgtgtttggtcagaaaaaaaactactttcaattcacagtcactaaatagcaattttactcgtaagacaggctacctaatcggaagcagttgatgcccatcagggtataggggaagaggtgggatatagtggaaagaacacagagtttgaaattaaattggatttgcatataggccctatttagtttgtttgtttatttatttattatattttgagacgacttcgctctgtcgcccaggctggagtgcagtggcgccatcttggctcactgcaacctctgcctcctgggttcaagcgattcttctgcaccagccacccgagtagctgggattacaggcgcgcgacactacgcccagctaatttttgtatttttagtagagacggggttatgccatgttggccatgctgctctcgaactcctgacttcaggtgatccgcatgc

SEQ ID NO: 1374 - DNA, 3881 bp, Homo sapiens; identical to SEQ ID NO: 975

SEQ ID NO: 1375 - DNA, 874 bp, Homo sapiens; identical to SEQ ID NO: 976

SEQ ID NO: 1376 - DNA, 3573 bp, Homo sapiens; identical to SEQ ID NO: 980
  misc_feature (1)...(3573): n=a,t,g or c

SEQ ID NO: 1377 - DNA, 14117 bp, Homo sapiens
tttctttcaaaatatttctgctcattgacaatgcatctgatcacccaagagccctgatggagctgtccaaggagattaatgtttttgtgtttgccaacacaacatccattccacagcccatggatcaaaaactaattttgactttcaagtcttattacctaagaaatatatttcataaggctatagctgccatacagatgattcctctgatggatctgggcaaagtaaattgaaaaccttctgaagaggattcactattctatatgtcaatatttgtgattcaagagaggaggtcaaaatatcaacattaacaggagtttggaagaagttgattccaactctcatgtatgatgttgaggggcttaagacttcagcagaggaagtaactatagatgtgttggaaacagcaagagaattaaaattagaatggagcctgaagatgtgactgaattgttgccatgttatggcaaaacgaacggatgaggaactgcttcttattcatgaacaaagaaagtggtttcttgagatggaaactactcctggtgaagatgctgtgaacatcactgaaatggcaacaaaggatttggaatactacatcaatttagttaataaggcagtggcagggtttgagaggactgaccctagttttgaaagaatttctactgttaaaatgctatcaaacagcatcacatgctacagggaaatctttcatgaaaggaagagtcaactgatgcggcaaacttcactgatgtctcattttcagaaattgccacagccacactaacttgcagcaatcatcaccctgatcagtcctcagccatcaacattgaggcaagaccttccaccagcaaaaagattataacttgctgaaggctcagatgatccttagcatttttagcaagaaagcatttttaaaattaagttatatacattgtttttaggccataatgctatggtacacttaatagactatagtatagtgtaaatataatgtttacatacacagaaaaaccaaaaagtttgtgtgactcactttatggttacatttgctttattgtggtggtctagaactgaacatgcactatctctgaggtatgcctgtatcttcctctatcttcagtgggtctccaaaccacctgaaggacatgctaaacacaggctgctgcatcccagccccagcctcagagtttctgattcagccagtctgggatgagcctgaaaaactgccatttcttttttttttacattttatttttatttttatcaaagcagtgtatctacattgtttaaataaaacaacattaaatagcaaatatttaaaaactgcaacatctatgccttctttctttctttattgttattatactttaagttttagggtacatgtgcacaatgtgcaggttagttacatatgtatacatgtgccatgctggtgtgctgcacccactaactcgtcatctagcattaggtatatctcccaatgctatctctcccccgtccccccaccccacaacaaatgagaacacatggacacaggaaggggaacatcacactcttttttttaaaaattttactttaagttctgggatgcatttgcagaatgtgcaggtttgttgcataggtatacatgtgccatggtggtttggctgcacctatcacccatcatctaggttttaagcccgcatgcattaggtatttgttctaatgctctctctccccttgccccccatcccccgacaggccctggtgtgtgatgttcccctccctgtgtccatgtgttctcattgttcaactcccacttatgagtgagaacatgtggtgttcggttttctgttcctgtgttggtttgctaagaatgatggtttccagcttcatccatgtccctgcaaaagacacgaactcattcttttttatggctgcatagtatttcatggtatatatgtgccacattttctttatccagtctgtcattgatgggcatttgggttggttccaagtctttgctattgtaaatagtgctgcaataaacatacttgtgcatgtgtctttatagtagaaagatttataatcctttgggtatatacccagtaatgggattgctgggtcaaatggtatttcttggttttagatcattgaggaatcaccatgctgtcttccacaatggttgaactaatttacactcccaaccaacagtgtaaaagctttcccatttctccacagcctttgccagcatctgttgttaccagacttgttaatgatcaccattctaactggcatgatatggtatctcattgtggttttcatttgcatttctctaatgaccagtgatgatgagctttttttcatatgtttcttggccacataaatgtcttcttttgagaagtgcctgttcatatcctttgcccactttttgatggggttgtttgttattttcttgtaaaattttgtttaagctccttgtagattctggatattagacctttgtcagatgggtagattgcaaaaattttctccaattctataggttgcctgctgactctgataacagtttcttttgctgtgcagaagctctttagttgaattagacccatttgtcaactttggcttttgttgcaattgcttttgctgttttagtcatgaagtctttgcccatgcctatgtcctgaatggtattgcctagactttcttctagggtgaaaactcacatttctaacatgttcctgagtcaggttgatgctgagagtgactgataacaccttattataataattatagtttttgggtgagaggattaaatgggcaaattaatgccaagcactcagcaccatgcctggtatttgtatacattccacaagtgctggctatgattctgaagggtggcctgatgagtctcatcccttgtagttggtattgccatcacacctccttccatctgatgctataatcttctctaaataggtaatccagacaaggtactggaatttgtagttgttgcagagaatcaaattgtgagagtatttgatctgaccccctcgattggcatgaagaaactgaggtctggagagacaaaattactttcccaaggccaaatggcaagtcagaggcagtatatctacgctctccttttcttatgcaatgaatgagctgggtggcattttccctttcctgttcttgtactgacatttctgggaatatgtgaaacataaggcaagtacttataccccaaaattatatcaagaagattactgaataaaaaagtggctatatagcacacacatactaaatgtgaagctcacagcttttgcagccaggactgaaaaccactgctctagcatgttgccttcttaagtgaatgcccagggcttctatagttgggcaaatatgctccctgtctcctggcttagctcattccagggctatagaacatcctttcccaagggagtggattcacactgcttccatagtctgagatcctgaagtgagccttccccatctgccacaacagaaagtaaaagtagaacctgtccaactattctcagtctgttcaacaaacaatttattgagcacttgacaattgtgtatatggtgcagtgataattgaatggatggtccagagggggcaagacagagcagctgccacctggagatgttcatgatatggacttttccaagaggaagagaccaactggaaagatgtacctgattcttaggcttctgtttgggtcttttttttttttttttttttgccttttgaaggggtgcagcattcctggaggtactgcaataccaggtcaacatgtagagtgaacagagcaagctcttattccatctccctgctcccaaaatccatttaatatgttgtcctcagatggaggacgtatcagatattaagacgataagaacagataccacacttgatcttagccaaaaggctgcacaaagaagtgatgctgcctatgtcttgagttcattctctccccactgatattattttcttccccttggcaggaagatgatgtctgttaggaagcctctgaggttcctgttcctttctgctggatttatgccgctgccagcatcggagcagtttctaccacccacacatttccttgttaaatagccaggcctcttcccatggggaatgctttcattaaaagaggcagccactgctgcacagacctgcaggcttctcagggctagagcaggcgggggtgcagtgggcaaagccagtggaggcacaggctgggttgtggcagtctcctggagggccctgccctagtaatgagggcccaggcatgcggctgaccctttgaagatgtgtcctgaagctctctcatggtgatcaatgacaggaacccagactcctgctttagccaaatgataagtttggcctcttttattggaaaccaaattacaaattaattagcagcttcctctggggctgggtgtgaacatcaacaccacccaatgatgaatttctatcatgagccccctcactgcaagggcataaaatggcccgggcggcatggggtctgtagacatccaggtagctgtggctgaggagaaagggcctctccaacatgacatcctcctgctgtgtcaccaacaacttgcaagcctctctcaagagctgcccccggcctgcctcggtctgttccagcggcgtgaactgccggcctgagctgtgcctgggctatgtctgccagcccatggcatgcctgccttcggtctgcctgcccaccaccttccggccagccagctgcctctccaaaacctatctatccagttcctgccaggcagccagtggcatctccggctccatgggccccggcagctggtacagcgaaggggccttcaatggcaatgagaaggaaaccatgcagttccttaacgaccgcctggccagctacctgacgagggtgcggcagctggagcaggagaatgcggagctggagagcaggatccaagaggcctctcactcccaggtgctcaccatgactcctgactaccagtctcatttcaggaccattgaccagctccagcagaaggtgagggcagcggtgaggtgaataggctctctgggaagggaactggactagctggcattccagattggaatctcgttagcttattaagctatgttcaggacaaagagacttccctagggcatagggttattttataatttgagcactcagcctgaggctttcatgtggagagatctgggatctagtctcagttctaccattgcctcattgcatgactttgggggtcccatcccttccccaggcctcagttttctcatctgtaaaacagggataataatggtcgttatctaatggggttgtcaaaaggatttgatgagatgatgcaggtcaagtgcttggaacagcccctggtccacggtaagttttcagtaaatgtcaaagacccttctaactgtcacatgagtgacttcagacatgagattcttcccttccacattgcttggcacatccaaaatggggaatttgaatttacgaagcttcaggttcttaaaaaatacatctcaagttctccaaggactagcaattcgctaaatatctcccagagttccagggaagaggaccttctgcagggatggctgcagggctgctggatcctacctttgctgctgtcttctcttcatttgggttcttcttgcttcgtctcatcctgaactaaccctctccatgtgccttggcctacagattctgtgtaccaaggcagagaatgccaggatggttgtgaacattgataatgccaaactggctgccgatgacttcagggccaagtgagttcagtcggggggctggagctggggaggacctgtcctcataggctctggggcaactttccattagtttcacggagggttggaaagtgccggcagtttaaggccttccctgagttctgcattctgtttcacccttggttgctgaccctgtccttgtgcaggtacgaggcagagctggccatgcggcagctggtggaggccgacatcaatggcctgcgcaggatcctggatgatctcactctgtgcaaggctgacctggaggcccaggttgagtccctgaaggaggagctgatgtgcctcaaaaagaaccatgaggaggtgaggctgggaagtcccgctgaagtggccccgggaagcagagggggaggaacgtggggtatggggttggataggcgtgggttgaaattcccaagcctgccacatgttgttttagtgactttgcccaatttatggaatcttcctgagcctcctcttctgtaaaatggggacaacatgatcacgcagggttattgtgaggatttaatggacaggatatggatcatggaaatccccaaggcatgggtatgaaacacctgccacttggtcaactctcagaagtgtagcccccttcccttctgcatttcctgggctagtgtgactgccaagcactcactagtggcaactgcatttttttctctcgagagccacacagcagaggtagagtggtgcagtggtgccggggtgagttatgttccagatctcacgttgaatggcctgtccatctctgcctggctcaactctcagaagcagtcccatctcttctgagagggagtacagctgcagtggtctcctctttttgcccctatccttattttgtcctcccttctgtttgcatataaaatgctcaagctgaagccctttactttctgatttttccttatctcctgaagtttcttggaggggaagccctctgctttgggcacctgtgtgctgccaagcccacctgagccatggtgtttttcccccctccctccttgactctcaacctcttgacttgggatttgaatgaacaagtgcctctgaatcttggctgggtttcctcagggcttaagtgtaaagtaacaatcagtcaccacgtactcaccgagcaccctcgggctcctgactcatcttgctcaaatcagagaactgggaacggcaccaagaagccactaatgagaagttatcacacatcctggcagactcagtgacaactttccctcttggcagccaagcctgggaggcagctgccctaactcgggcctttaactagtcaagccaggctcctgctaccctcctccaggatgaacacaggtggggagggagactgggaatactaggggtaccggtttcccattttagcccaaatgcatcaaacaaaccagggtgctgctcttggcttctgccaaagtgagaggaagtgttgtgttgcagtgaggttcccatcgcaggggtattcagctggagtttgaagagcactgggatgctgctgagtggactgcagtccttaggggccatctaatgtttcaatctttagcaacttttgttgcatcttttcatgtctccctggggaggtgagccaggatcctatgattgtcacatttttctggaggtcttgtgccttttcaggaagtcggttcccttcgatgccagcttggggaccgccttaacatcgaggtggacgctgcacccccggtggacctgaccagggtgctggaggagatgcggtgtcagtacgaggccatggtggaggccaaccgcagggacgtggaggaatggttcaatatgcaggtgggcctctcacggtggggatggcctcctccatatccctaggaagggactctagccttctccttcccccaactgcagatggaggagcttaaccaacaggtggccacaagctctgagcagcttcagaactaccagtcagacatcattgacctgagacgcacggtcaacacgctggagatcgagctgcaggcccagcacagcctggtgagagctgctgggtgggcacccatccctccggatcctaggcggtactgagcataggtgcaggtccccaggaaagaggaagaggaggctcagatttcagccaccatggatgctcatcctgttgacttttcccggagggaggtttctcccgagatccagctcagagataaaaaagggatgtttcaaatcagacatgggttaggtgacactgtcaaactcaactccactaagaaggcttgttctgtgcttagcctgcccttccaaacctatggatctcaatatcacccatcctgatacccaggttcttttctggaccaactgaaccagagtctctggaggtgggacctgatcacagctattttttttttttttgagatggagtctcactctgttgcccaggctggagagcagtggcatgatctcagctccctgcaacctctgacccgctgggttcaagtgattttccagcctcagcctcccaagtagctggattacaggcgtgcaccactatgccctgctaatgtttgtatttttagtagagagggggtttcaccatgttggccaggctggtctcgaactcctgacctcaggtgatccacctgccttggcctcccagagtgctgggattacaggcatgagctactgtgaccggccagccatgggtattttttgagggctcccatgtggcgctaatgtgcagctaggtttgaaaacccctgttctaaatgatgccggcagggagggtacttgggaaatctcagtccaatcctgaaggcagacaaaggttgcggaagaaaggagggatttaggatcagatttacgaatagaaactgtggttccataatgtaccagctgtttacccttgaacaagtcatttgacctttctgggcttctgtttccaaagtgactggtgtagggagggcttcatttccagcatcaaatggagatttggctcttcttggttctttctgaagcaggccatggtaaacagctcccttcctcatggttatgtcttcctttgccttagagggactccctggaaaacacgctgacggagagtgaggcccgctacagctcccagctggcccagatgcagtgcatgatcaccaatgttgaggcccagctggctgagatccgggctgagctggagcggcagaaccaggagtaccaggtgctgctggacgtccgggcccggctggagggcgagatcaacacgtaccggagcctgctggagagtgaggactgcaagtatgcaggcccagctgaggcttagagagacgtgggcagggattctgggaggttataggaagcaactggatctacccttgagggaccatcagcttagaaccctgtcctgactatggagccattaagaagctggtatgctctgaaggaagtcaggcagtggtgttcatgctgccatcctgaaccaagcccctcggagaccattctatctcattccaagctggcaagctccttctaagtgcccaccatggggcaggtgctatggaggacaccaagatagaggaagacagggcatttgcctcctgtcatttccatatgtttagggagataggcagacaggtgactggaggtcatggcctgtccggagcttaggatgaaaagcagctttattaatagtacctacacatctgctcccactcttacccagcctcacctcatagctccattcctctcagaacggagattttggcatgtcagcaggacaataggtagccttgtgtaattgagccctggtggggagcaggacaggaaagatcagccggggcccatttatggagaacaacacgggtcatactgggaagggagggctttaatttataggtgagtggaaattgttttgaggaggaaatgagagaatttactgtgtgtcttctccactagatggtaaacatctagaatgcagagacattataatacaattttattccctgtacgtggcacatagtagatgctcagtaaatgtctctcaagctcaaagctgttcttcaggaagatggccctgatagcagcaggaagaactgagtagagggaggggaaccaggcagggaaactgtccaggaggccctggccacagcctaggtaagcaatagggagggcctgagttagggcagcagaggcatcagctctagacactgtgcaggtagaatcagcaggacttggtggctgtctgaatgcagggtacctctgggccatggacacccggtgggctgacgactgttgtagctgtttcttattccgcatttggcgttgcttctccatcattcagaatctataacttcagggcaagtgttgtgtcaaacatttgcaaggaccaggccattaacatgcatgaatgacgtgggtcatactgagatggtagaaaagcagaaagctcttgccttgtccaatccaggcaatggcatgccctcagggccactctactgtgtgagaagcaggtccaatattgctgatcttccaatagttccagggaagctgagaatctgggtttttaaaaatgttaaattctcctgattcttaagtattttcaaaaaattaaagaaaatatatagtgccaggcaaatggaacacatttcaggttgcacatgatcctcaggcctcccattggttctctgagctactgggtttccatccagcatccagtgtgttgttcctggttttgagtgcatgcctgtcagtctctgagtcatcctttttcctttcaccatgtattaattcttcattcatttattgttttgtctgatccaaatattcttattaggtgcctattctatgtgaggtatgcagggtgggcatgggtctgtggctgctggcctcactgcttggccggggagacagaccataatagaatgattactactcacgatgaaaggagatacatgtaccatgggggctttgtctcagagaggtgggggaggcttcaaggaggacgtgacagttgagttgagctcttaaacaagagaagaaatgtaggtgagtggagaggggaagagggttccagagatgtacggcacaggcacaagccctgtggcctgagcagtacagtccctgcaggagctggaagaaggtcagagtacctgcagctcccagagtaatggagctatcaggtgaggctggggcaagaggtgggagcaggatcatgcaggtcctattaaggaagcttcttttctttattttattttattttactttaacttctgggatacatgtgcagaacgtgcaggtttgttacataggtgtacatgtgccatggtggtggttttgttgcctatcaacccgtcatgtaggttttaagccctgcatgcattagatatttgttttaattttctccctccctgctcccctcacctctcgacaggccccagtatatgatgttccccggcctgtgtccatgtgttctcattgttcaactctcacttatgagtgagaacatgtagtgtttggttttctgttcctgtgttagtttgctgagaatgatggcttccagaggaagctgcttttcatcctgagctcaaatggaagccactgaaggttttagggaggggagggacataattggatttgtgactgtagaagattgctctggctactaagtggacagtggttaggaggggcccaagtggggttggggagatcagttaggaggccatgaggtgactcaggcaaagatggcggaggttgggaccagggaggctgggcagagaaagcacggaagatggggttgagaggcatccgaggggagaattggcaggacctgtggccgagtgggccttctctactaatcctgtttctctttagactttctcctgcaggctgccctgtaacccatgctccactccttcctgcaccacctgtgtgccctccccatgcgtgacccgcaccgtctgtgtgccacgcactgttggcatgccttgctcaccctgcccccagggccgctactgaagtccctttgtgccagtggatcctggagggcctggggctgggcagcctggtattcagtggccaccagaagagcagggccagccccggtcagcaaggaagaccctgagcaggaccgtggatcacctgcaacaagctctgatactccaggggatacttaagccctcatcacttcaaaactgcctcttttttccatgggtgaactgttctctttggtgatgtttctggttgtctgtgctgcctcaaagagcgtgtgttcttagttaactggcaaatagagctgtactcagtggccttgcaaacatgtctgtctctgtttgtcacttacgctgctgcatccacaagccaatcctactcaattgggcttaagaggaacgtgggcaaattctgtatttatttttatgctccttctgcttccatagaggcttgagaggtgttcactaaaagggcccgcatgccataaaccagttaaaactaatcaattactctagagccaagtaataaaagaataaagagaggagggagataattatgccagaaacctaggccaaattactgtaattgagaatcatatcataataaacccacccctaaatctcattacagctggtacaatgtgatcattcattctttcaaaatatcttcactgagcagctactgggtgcaggttctgcattagaggctggctaatccaaggaagagttcccagacacattgttagtaatgcttcatttaatccttgcaacaatccgtgaaaaatatgccattattgcatccattttgtaaatgaggaaactgaggcccagagaagttaagaaacttgcccaaagtcacacagcttgttagtggcagacccaggactgaaatcgaggcctttgggctctagagatgctcaaccgattcacattcacagtcctcactatttgcaaactacagctgggtgcagggggtattaaaaatgcaagtgatcaccaccattcaaacacttgtaattacaggaggagctaagacccatgtgcataagatgccactcctttcttcataagggccatataatagtaacagtaataatagtaataatggcaacggttactaattcttgagcacttataatgcactgagtactgtgtggagcatattacataaattaacttatgcagttttcatgaccaccttgtaaggtacacatagtatccattttagacatggaaatggaggcatagggtggtcaagttagttgttgaaggttacatgcaaggacaaagacttaaacccaagtctagcttcacagcagtgttattttaaccattctaactgccaaattcctacccagaaagagtaaacactagtcaagatttggagaaagtcttaagctgagaggatcctgaaaggcttcttgtagctggtggcatttgaaataggtcttggaggttgaatagaaggtctacagggcaccagataggcaagtaagtgtgtggggatcttcaggagagcagggggtcatgcttggaaggcctcaaggggtcttgctggctggagcagtgagttcctgtgagaggctgactggggatgaagctcaaatggtagaaaggcatcagagagtaggggggccttgggtaccccacaaaaagcctggattctggactctatcctgaaggcaatgggagggctgctgcaggatttgagcccaaagatgacatgacttgagtggcatcttagaaagtatcaccaagtaacacagacaggatagctaagaggaggggttaggctgtggaagaagctaacagggtctcaggcaagacaatgtcagggaccatggaaaaataaggaatcaatctaagagacactgtgatggacctgacttggcaatggattggccatggcaggtaaagaggagagagctggggacaggaatcttgaacacctttcagaacctcaccctccaaacacacagttcttccttaatgagctgagatgatgtttctattaagtatcctccctctggccttgccaagaaatgatgaaaaatggattggatcctgaagctgcctgcaggctgctctccagacatgatcctgcaggcatccctggcagacaaggtcattagcctgacagcagggacatgaacatactgcttagcaagctgtggttcctggttgatggatgggtaaaatttcaagaagctgaaatgccaagagagaggggttctggctaattgaattttctcataaccgcgtgcaaaccagcaatctttaatttcaaccccggtgcaaaacttttctggaatgtgctcagcttgataaacaacacgcagaacagaccaaagctt

SEQ ID NO: 1378 - DNA, 1296 bp, Homo sapiens; identical to SEQ ID NO: 983

SEQ ID NO: 1379 - DNA, 3360 bp, Homo sapiens; identical to SEQ ID NO: 985

SEQ ID NO: 1380 - DNA, 9534 bp, Homo sapiens
cagcgactcctctggctcccgagaagtggatccggtcgcggccactacgatgccgggagccgccggggtcctcctccttctgctgctctccggaggcctcgggggcgtacaggcgcagcggccgcagcagcagcggcagtcacaggcacatcagcaaagaggtttattccctgctgtcctgaatcttgcttctaatgctcttatcacgaccaatgcaacatgtggagaaaaaggacctgaaatgtactgcaaattggtagaacatgtccctgggcagcctgtgaggaacccgcagtgtcgaatctgcaatcaaaacagcagcaatccaaaccagagacacccgattacaaatgctattgatggaaagaacacttggtggcagagtcccagtattaagaatggaatcgaataccattatgtgacaattacactggatttacagcaggtgttccagatcgcgtatgtgattgtgaaggcagctaactccccccggcctggaaactggattttggaacgctctcttgatgatgttgaatacaagccctggcagtatcatgctgtgacagacacggagtgcctaacgctttacaatatttatccccgcactgggccaccgtcatatgccaaagatgatgaggtcatctgcacttcattttactccaagatacaccccttagaaaatggagagattcacatctctttaatcaatgggagaccaagtgccgatgatccttctccagaactgctagaatttacctccgctcgctatattcgcctgagatttcagaggatccgcacactgaatgctgacttgatgatgtttgctcacaaagacccaagagaaattgaccccattgtcaccagaagatattactactcggtcaaggatatttcagttggagggatgtgcatctgctatggtcatgccagggcttgtccacttgatccagcgacaaataaatctcgctgtgagtgtgagcataacacatgtggcgatagctgtgatcagtgctgtccaggattccatcagaaaccctggagagctggaacttttctaactaaaactgaatgtgaagcatgcaattgtcatggaaaagctgaagaatgctattatgatgaaaatgttgccagaagaaatctgagtttgaatatacgtggaaagtacattggagggggtgtctgcattaattgtacccaaaacactgctggtataaactgcgagacatgtacagatggcttcttcagacccaaaggggtatctccaaattatccaaggccatgccagccatgtcattgcgatccaattggttccttaaatgaagtctgtgtcaaggatgagaaacatgctcgacgaggtttggcacctggatcctgtcattgcaaaactggttttggaggtgtgagctgtgatcggtgtgccaggggctacactggctacccggactgcaaagcctgtaactgcagtgggttagggagcaaaaatgaggatccttgttttggcccctgtatctgcaaggaaaatgttgaaggaggagactgtagtcgttgcaaatccggcttcttcaatttgcaagaggataattggaaaggctgcgatgagtgtttctgttcaggggtttcaaacagatgtcagagttcctactggacctatggcaaaatacaagatatgagtggctggtatctgactgaccttcctggccgcattcgagtggctccccagcaggacgacttggactcacctcagcagatcagcatcagtaacgcggaggcccggcaagccctgccgcacagctactactggagcgcgccggctccctatctgggaaacaaactcccagcagtaggaggacagttgacatttaccatatcatatgaccttgaagaagaggaagaagatacagaacgtgttctccagcttatgattatcttagagggtaatgacttgagcatcagcacagcccaagatgaggtgtacctgcacccatctgaagaacatactaatgtattgttacttaaagaagaatcatttaccatacatggcacacattttccagtccgtagaaaggaatttatgacagtgcttgcgaatttgaagagagtcctcctacaaatcacatacagctttgggatggatgccatcttcaggttgagctctgttaaccttgaatccgctgtctcctatcctactgatggaagcattgcagcagctgtagaagtgtgtcagtgcccaccagggtatactggctcctcttgtgaatcttgttggcctaggcacaggcgagttaacggcactatttttggtggcatctgtgagccatgtcagtgctttggtcatgcggagtcctgtgatgacgtcactggagaatgcctgaactgtaaggatcacacaggtggcccatattgtgataaatgtcttcctggtttctatggcgagcctactaaaggaacctctgaagactgtcaaccctgtgcctgtccactcaatatcccatccaataactttagcccaacgtgccatttagaccggagtcttggattgatctgtgatggatgccctgtcgggtacacaggaccacgctgtgagaggtgtgcagaaggctattttggacaaccctctgtacctggaggatcatgtcagccatgccaatgcaatgacaaccttgacttctccatccctggcagctgtgacagcttgtctggctcctgtctgatatgtaaaccaggtacaacaggccggtactgtgagctctgtgctgatggatattttggagatgcagttgatgcgaagaactgtcagccctgtcgctgtaatgccggtggctctttctctgaggtttgccacagtcaaactggacagtgtgagtgcagagccaacgttcagggtcagagatgtgacaaatgcaaggctgggacctttggcctacaatcagcaaggggctgtgttccctgcaactgcaattcttttgggtctaagtcattcgactgtgaagagagtggacaatgttggtgccaacctggagtcacagggaagaaatgtgaccgctgtgcccacggctatttcaacttccaagaaggaggctgcacagcttgtgaatgttctcatctgggtaataattgtgacccaaagactgggcgatgcatttgcccacccaataccattggagagaaatgttctaaatgtgcacccaatacctggggccacagcattaccactggttgtaaggcttgtaactgcagcacagtgggatccttggatttccaatgcaatgtaaatacaggccaatgcaactgtcatccaaaattctctggtgcaaaatgtacagagtgcagtcgaggtcactggaactaccctcgctgcaatctctgtgactgcttcctccctgggacagatgccacaacctgtgattcagagactaaaaaatgctcctgtagtgatcaaactgggcagtgcacttgtaaggtgaatgtggaaggcatccactgtgacagatgccggcctggcaaattcggactcgatgccaagaatccacttggctgcagcagctgctattgcttcggcactactacccagtgctctgaagcaaaaggactgatccggacgtgggtgactctgaaggctgagcagaccattctacccctggtagatgaggctctgcagcacacgaccaccaagggcattgtttttcaacatccagagattgttgcccacatggacctgatgagagaagatctccatttggaacctttttattggaaacttccagaacaatttgaaggaaagaagttgatggcctatgggggcaaactcaagtatgcaatctatttcgaggctcgggaagaaacaggtttctctacatataatcctcaagtgatcattcgaggtgggacacctactcatgctagaattatcgtcaggcatatggctgctcctctgattggccaattgacaaggcatgaaattgaaatgacagagaaagaatggaaatattatggggatgatcctcgagtccatagaactgtgacccgagaagacttcttggatatactatatgatattcattacattcttatcaaagctacttatggaaatttcatgcgacaaagcaggatttctgaaatctcaatggaggtagctgaacaaggacgtggaacaacaatgactcctccagctgacttgattgaaaaatgtgattgtcccctgggctattctggcctgtcctgtgaggcatgcttgccgggattttatcgactgcgttctcaaccaggtggccgcacccctggaccaaccctgggcacctgtgttccatgtcaatgtaatggacacagcagcctgtgtgaccctgaaacatcgatatgccagaattgtcaacatcacactgctggtgacttctgtgaacgatgtgctcttggatactatggaattgtcaagggattgccaaatgactgtcagcaatgtgcctgccctctgatttcttccagtaacaatttcagcccctcttgtgtcgcagaaggacttgacgactaccgctgcacggcttgtccacggggatatgaaggccagtactgtgaaaggtgtgcccctggctatactggcagtccaggcaaccctggaggctcctgccaagaatgtgagtgtgatccctatggctcactgcctgtgccctgtgaccctgtcacaggattctgcacgtgccgacctggagccacgggaaggaagtgtgacggctgcaagcactggcatgcacgcgagggctgggagtgtgttttttgtggagatgagtgcactggccttcttctcggtgacttggctcgcctggagcagatggtcatgagcatcaacctcactggtccgctgcctgcgccatataaaatgctgtatggtcttgaaaatatgactcaggagctaaagcacttgctgtcacctcagcgggccccagagaggcttattcagctggcagagggcaatctgaatacactcgtgaccgaaatgaacgagctgctgaccagggctaccaaagtgacagcagatggcgagcagaccggacaggatgctgagaggaccaacacaagagcaaagtccctgggagaattcattaaggagcttgcccgggatgcagaagctgtaaatgaaaaagctataaaactaaatgaaactctaggaactcgagacgaggcctttgagagaaatttggaagggcttcagaaagagattgaccagatgattaaagaactgaggaggaaaaatctagagacacaaaaggaaattgctgaagatgagttggtagctgcagaagcccttctgaaaaaagtgaagaagctgtttggagagtcccggggggaaaatgaagaaatggagaaggatctccgggaaaaactggctgactacaaaaacaaagttgatgatgcttgggaccttttgagagaagccacagataaaatcagagaagctaatcgcctatttgcagtaaatcagaaaaacatgactgcattggagaaaaagaaggaggctgttgagagcggcaaacgacaaattgagaacactttaaaagaaggcaatgacatactcgatgaagccaaccgtcttgcagatgaaatcaactccatcatagactatgttgaagacatccaaactaaattgccacctatgtctgaggagcttaatgataaaatagatgacctctcccaagaaataaaggacaggaagcttgctgagaaggtgtcccaggctgagagccacgcagctcagttgaatgactcatctgctgtccttgatggaatccttgatgaggctaaaaacatctccttcaatgccactgcagccttcaaagcttacagcaatattaaggactatattgatgaagctgagaaagttgccaaagaagccaaagatcttgcacatgaagctacaaaactggcaacaggtcctcggggtttattaaaggaagatgccaaaggctgtcttcagaaaagcttcaggattcttaacgaagccaagaagttagcaaatgatgtaaaagaaaatgaagaccatctaaatggcttaaaaaccaggatagaaaatgctgatgctagaaatggggatctcttgagaactttgaatgacactttgggaaagttatcagctattccaaatgatacagctgctaaactgcaagctgttaaggacaaagccagacaagccaacgacacagctaaagatgtactggcacagattacagagctccaccagaacctcgatggcctgaagaagaattacaataaactagcagacagcgtcgccaaaacgaatgctgtggttaaagatccttccaagaacaaaatcattgccgatgcagatgccactgtcaaaaatttagaacaggaagctgaccggctaatagataaactcaaacccatcaaggaacttgaggataacctaaagaaaaacatctctgagataaaggaattgataaaccaagctcggaaacaagccaattctatcaaagtatctgtgtcttcaggaggtgactgcattcgaacatacaaaccagaaatcaagaaaggaagttacaataatattgttgtcaacgtaaagacagctgttgctgataacctcctcttttatcttggaagtgccaaatttattgactttctggctatagaaatgcgtaaaggcaaagtcagcttcctctgggatgttggatctggagttggacgtgtagagtacccagatttgactattgatgactcatattggtaccgtatcgtagcatcaagaactgggagaaatggaactatttctgtgagagccctggatggacccaaagccagcattgtgcccagcacacaccattcgacgtctcctccagggtacacgattctagatgtggatgcaaatgcaatgctgtttgttggtggcctgactgggaaattaaagaaggctgatgctgtacgtgtgattacattcactggctgcatgggagaaacatactttgacaacaaacctataggtttgtggaatttccgagaaaaagaaggtgactgcaaaggatgcactgtcagtcctcaggtggaagatagtgaggggactattcaatttgatggagaaggttatgcattggtcagccgtcccattcgctggtaccccaacatctccactgtcatgttcaagttcagaacattttcttcgagtgctcttctgatgtatcttgccacacgagacctgagagatttcatgagtgtggagctcactgatgggcacataaaagtcagttacgatctgggctcaggaatggcttccgttgtcagcaatcaaaaccataatgatgggaaatggaaatcattcactctgtcaagaattcaaaaacaagccaatatatcaattgtagatatagatactaatcaggaggagaatatagcaacttcgtcttctggaaacaactttggtcttgacttgaaagcagatgacaaaatatattttggtggcctgccaacgctgagaaacttgagtatgaaagcaaggccagaagtaaatctgaagaaatattccggctgcctcaaagatattgaaatttcaagaactccgtacaatatactcagtagtcccgattatgttggtgttaccaaaggatgttccctggagaatgtttacacagttagctttcctaagcctggttttgtggagctctcccctgtgccaattgatgtaggaacagaaatcaacctgtcattcagcaccaagaatgagtccggcatcattcttttgggaagtggagggacaccagcaccacctaggagaaaacgaaggcagactggacaggcctattatgtaatactcctcaacaggggccgtctggaagtgcatctctccacaggggcacgaacaatgaggaaaattgtcatcagaccagagccgaatctgtttcatgatggaagagaacattccgttcatgtagagcgaactagaggcatctttacagttcaagtggatgaaaacagaagatacatgcaaaacctgacagttgaacagcctatcgaagttaaaaagcttttcgttgggggtgctccacctgaatttcaaccttccccactcagaaatattcctccttttgaaggctgcatatggaatcttgttattaactctgtccccatggactttgcaaggcctgtgtccttcaaaaatgctgacattggtcgctgtgcccatcagaaactccgtgaagatgaagatggagcagctccagctgaaatagttatccagcctgagccagttcccaccccagcctttcctacgcccaccccagttctgacacatggtccttgtgctgcagaatcagaaccagctcttttgatagggagcaagcagttcgggctttcaagaaacagtcacattgcaattgcatttgatgacaccaaagttaaaaaccgtctcacaattgagttggaagtaagaaccgaagctgaatccggcttgcttttttacatggctgcgatcaatcatgctgattttgcaacagttcagctgagaaatggattgccctacttcagctatgacttggggagtggggacacccacaccatgatccccaccaaaatcaatgatggccagtggcacaagattaagataatgagaagtaagcaagaaggaattctttatgtagatggggcttccaacagaaccatcagtcccaaaaaagccgacatcctggatgtcgtgggaatgctgtatgttggtgggttacccatcaactacactacccgaagaattggtccagtgacctatagcattgatggctgcgtcaggaatctccacatggcagaggcccctgccgatctggaacaacccacctccagcttccatgttgggacatgttttgcaaatgctcagaggggaacatattttgacggaaccggttttgccaaagcagttggtggattcaaagtgggattggaccttcttgtagaatttgaattcgcgacaactacaacgactggagttcttctggggatcagtagtcaaaaaatggatggaatgggtattgaaatgattgatgaaaagttgatgtttcatgtggacaatggtgcgggcagattcactgctgtctatgatgctggggttccagggcatttgtgtgatggacaatggcataaagtcactgccaacaagatcaaacaccgcattgagctcacagtcgatgggaaccaggtggaagcccaaagcccaaacccagcatctacatcagctgacacaaatgaccctgtgtttgttggaggcttcccagatgacctcaagcagtttggcctaacaaccagtattccgttccgaggttgcatcagatccctgaagctcaccaaaggcacagcaagccactggaggttaattttgccaaggccctggaactgaggggcgttcaacctgtatcatgcccagccaactaataaaaataagtgtaaccccaggaagagtctgtcaaaacaagtatatcaagtaaaacaaacaaatatattttacctatatatgttaattaaactaatttgtgcatgtacatagaattc

SEQ ID NO: 1381 - DNA, 806 bp, Homo sapiens
tcccctccccaccacagctgtagtgcagtccaccgtctccagtggctatggcggtgccagcggtgtcggcagtggcttaggcctgggtggaggaagcagctactcctatggcagtggtcttggcgttggaggcggctttagttccagcagcggcagagccactgggggtggcctcagctctgttggaggcggcagttccaccatcaagtacaccaccacctcctcctccagcaggaagagctacaagcactgaagctgtgccgccagctctcagtcccacagctctcaggcccctctctggcagcagagccctctcctcaggttgcttgtcctcccctggcctccagtctcccctgccctcccgggtagagctgggatgccctcacttttcttctcatcaatactgttccactgagctcctgttgcttaccatcaagtcaacagttatcagcactcagacatgcgaatgtcctttttagttcccgtattattacaggtatctgagtctgccataattctgagaagaaaaatgacctatatcccccataagaactgaaactcagtctaggagttctcatctgacaagtcagttgtcctgatcttctcttgcagtgtcctgaatggcaagtagtgtaccttctagtgcagtctgcattcctgcactgctttctctgctctctttgccttcttttgttctgtgtgaataaagcatattgagaatgtgaacatgttgtgttagattgtattgctgaccacttcctggtttagaaacattcgcaccccacaaatggtttcttatctttggg

SEQ ID NO: 1382 - DNA, 3388 bp, Homo sapiens; identical to SEQ ID NO: 988

SEQ ID NO: 1383 - DNA, 5084 bp, Homo sapiens
gatcccatcgcagctaccgcgatgagaggcgctcgcggcgcctgggattttctctgcgttctgctcctactgcttcgcgtccagacaggctcttctcaaccatctgtgagtccaggggaaccgtctccaccatccatccatccaggaaaatcagacttaatagtccgcgtgggcgacgagattaggctgttatgcactgatccgggctttgtcaaatggacttttgagatcctggatgaaacgaatgagaataagcagaatgaatggatcacggaaaaggcagaagccaccaacaccggcaaatacacgtgcaccaacaaacacggcttaagcaattccatttatgtgtttgttagagatcctgccaagcttttccttgttgaccgctccttgtatgggaaagaagacaacgacacgctggtccgctgtcctctcacagacccagaagtgaccaattattccctcaaggggtgccaggggaagcctcttcccaaggacttgaggtttattcctgaccccaaggcgggcatcatgatcaaaagtgtgaaacgcgcctaccatcggctctgtctgcattgttctgtggaccaggagggcaagtcagtgctgtcggaaaaattcatcctgaaagtgaggccagccttcaaagctgtgcctgttgtgtctgtgtccaaagcaagctatcttcttagggaaggggaagaattcacagtgacgtgcacaataaaagatgtgtctagttctgtgtactcaacgtggaaaagagaaaacagtcagactaaactacaggagaaatataatagctggcatcacggtgacttcaattatgaacgtcaggcaacgttgactatcagttcagcgagagttaatgattctggagtgttcatgtgttatgccaataatacttttggatcagcaaatgtcacaacaaccttggaagtagtagataaaggattcattaatatcttccccatgataaacactacagtatttgtaaacgatggagaaaatgtagatttgattgttgaatatgaagcattccccaaacctgaacaccagcagtggatctatatgaacagaaccttcactgataaatgggaagattatcccaagtctgagaatgaaagtaatatcagatacgtaagtgaacttcatctaacgagattaaaaggcaccgaaggaggcacttacacattcctagtgtccaattctgacgtcaatgctgccatagcatttaatgtttatgtgaatacaaaaccagaaatcctgacttacgacaggctcgtgaatggcatgctccaatgtgtggcagcaggattcccagagcccacaatagattggtatttttgtccaggaactgagcagagatgctctgcttctgtactgccagtggatgtgcagacactaaactcatctgggccaccgtttggaaagctagtggttcagagttctatagattctagtgcattcaagcacaatggcacggttgaatgtaaggcttacaacgatgtgggcaagacttctgcctattttaactttgcatttaaaggtaacaacaaagagcaaatccatccccacaccctgttcactcctttgctgattggtttcgtaatcgtagctggcatgatgtgcattattgtgatgattctgacctacaaatatttacagaaacccatgtatgaagtacagtggaaggttgttgaggagataaatggaaacaattatgtttacatagacccaacacaacttccttatgatcacaaatgggagtttcccagaaacaggctgagttttgggaaaaccctgggtgctggagctttcgggaaggttgttgaggcaactgcttatggcttaattaagtcagatgcggccatgactgtcgctgtaaagatgctcaagccgagtgcccatttgacagaacgggaagccctcatgtctgaactcaaagtcctgagttaccttggtaatcacatgaatattgtgaatctacttggagcctgcaccattggagggcccaccctggtcattacagaatattgttgctatggtgatcttttgaattttttgagaagaaaacgtgattcatttatttgttcaaagcaggaagatcatgcagaagctgcactttataagaatcttctgcattcaaaggagtcttcctgcagcgatagtactaatgagtacatggacatgaaacctggagtttcttatgttgtcccaaccaaggccgacaaaaggagatctgtgagaataggctcatacatagaaagagatgtgactcccgccatcatggaggatgacgagttggccctagacttagaagacttgctgagcttttcttaccaggtggcaaagggcatggctttcctcgcctccaagaattgtattcacagagacttggcagccagaaatatcctccttactcatggtcggatcacaaagatttgtgattttggtctagccagagacatcaagaatgattctaattatgtggttaaaggaaacgctcgactacctgtgaagtggatggcacctgaaagcattttcaactgtgtatacacgtttgaaagtgacgtctggtcctatgggatttttctttgggagctgttctctttaggaagcagcccctatcctggaatgccggtcgattctaagttctacaagatgatcaaggaaggcttccggatgctcagccctgaacacgcacctgctgaaatgtatgacataatgaagacttgctgggatgcagatcccctaaaaagaccaacattcaagcaaattgttcagctaattgagaagcagatttcagagagcaccaatcatatttactccaacttagcaaactgcagccccaaccgacagaagcccgtggtagaccattctgtgcggatcaattctgtcggcagcaccgcttcctcctcccagcctctgcttgtgcacgacgatgtctgagcagaatcagtgtttgggtcacccctccaggaatgatctcttcttttggcttccatgatggttattttcttttctttcaacttgcatccaactccaggatagtgggcaccccactgcaatcctgtctttctgagcacactttagtggccgatgatttttgtcatcagccaccatcctattgcaaaggttccaactgtatatattcccaatagcaacgtagcttctaccatgaacagaaaacattctgatttggaaaaagagagggaggtatggactgggggccagagtcctttccaaggcttctccaattctgcccaaaaatatggttgatagtttacctgaataaatggtagtaatcacagttggccttcagaaccatccatagtagtatgatgatacaagattagaagctgaaaacctaagtcctttatgtggaaaacagaacatcattagaacaaaggacagagtatgaacacctgggcttaagaaatctagtatttcatgctgggaatgagacataggccatgaaaaaaatgatccccaagtgtgaacaaaagatgctcttctgtggaccactgcatgagcttttatactaccgacctggtttttaaatagagtttgctattagagcattgaattggagagaaggcctccctagccagcacttgtatatacgcatctataaattgtccgtgttcatacatttgaggggaaaacaccataaggtttcgtttctgtatacaaccctggcattatgtccactgtgtatagaagtagattaagagccatataagtttgaaggaaacagttaataccattttttaaggaaacaatataaccacaaagcacagtttgaacaaaatctcctcttttagctgatgaacttattctgtagattctgtggaacaagcctatcagcttcagaatggcattgtactcaatggatttgatgctgtttgacaaagttactgattcactgcatggctcccacaggagtgggaaaacactgccatcttagtttggattcttatgtagcaggaaataaagtataggtttagcctccttcgcaggcatgtcctggacaccgggccagtatctatatatgtgtatgtacgtttgtatgtgtgtagacaaatatttggaggggtatttttgccctgagtccaagagggtcctttagtacctgaaaagtaacttggctttcattattagtactgctcttgtttcttttcacatagctgtctagagtagcttaccagaagcttccatagtggtgcagaggaagtggaaggcatcagtccctatgtatttgcagttcacctgcacttaaggcactctgttatttagactcatcttactgtacctgttccttagaccttccataatgctactgtctcactgaaacatttaaattttaccctttagactgtagcctggatattattcttgtagtttacctctttaaaaacaaaacaaaacaaaacaaaaaactccccttcctcactgcccaatataaaaggcaaatgtgtacatggcagagtttgtgtgttgtcttgaaagattcaggtatgttgcctttatggtttcccccttctacatttcttagactacatttagagaactgtggccgttatctggaagtaaccatttgcactggagttctatgctctcgcacctttccaaagttaacagattttggggttgtgttgtcacccaagagattgttgtttgccatactttgtctgaaaaattcctttgtgtttctattgacttcaatgatagtaagaaaagtggttgttagttatagatgtctaggtacttcaggggcacttcattgagagttttgtcttgccatactttgtctgaaaaattcctttgtgtttctattgacttcaatgatagtaagaaaagtggttgttagttatagatgtctaggtacttcaggggcacttcattgagagttttgtcaatgtcttttgaatattcccaagcccatgagtccttgaaaatattttttatatatacagtaactttatgtgtaaatacataagcggcgtaagtttaaaggatgttggtgttccacgtgttttattcctgtatgttgtccaattgttgacagttctgaagaattc

SEQ ID NO: 1384 - DNA, 655 bp, Homo sapiens; identical to SEQ ID NO: 991

SEQ ID NO: 1385 - DNA, 2130 bp, Homo sapiens; identical to SEQ ID NO: 992

SEQ ID NO: 1386 - DNA, 2298 bp, Homo sapiens
gggaggtgtcgcagcgccatcaagaaggactgaggctccgcaatcggaggccgccgatttcgacccttcgcctcggcccggcccaatccaggccccggcccgccgcccccggccgcccccgcgtgccctctctcctccctctttgtgcgtctcgcgccgccgccgcccgccgcgtgagaggacgggctccgcgcgctccggcagccgattcgggtcccctccccccgggaggcttgcgaaggagaagccgccgcagaggaaaagcaggtgccggtgcctgtccccggggggcccatggcgaccggagcgaacgccacgccgttggacttcccaagtaagaagcggaagaggagccgctggaaccaagacacaatggaacagaagacagtgattccaggaatgcctacagttattccccctggacttactcgagaacaagaaagagcttatatagtgcaactgcagatagaagacctgactcgtaaactgcgcacaggagacctgggcatcccccctaaccctgaggacaggtccccttcccctgagcccatctacaatagcgaggggaagcggcttaacacccgagagttccgcacccgcaaaaagctggaagaggagcggcacaacctcatcacagagatggttgcactcaatccggatttcaagccacctgcagattacaaacctccagcaacacgtgtgagtgataaagtcatgattccacaagatgagtacccagaaatcaactttgtggggctgctcatcgggcccagagggaacaccctgaagaacatagagaaggagtgcaatgccaagattatgatccgggggaaagggtctgtgaaagaagggaaggttgggcgcaaagatggccagatgttgccaggagaagatgagccacttcatgccctggttactgccaatacaatggagaacgtcaaaaaggcagtggaacagataagaaacatcctgaagcagggtatcgagactccagaggaccagaatgatctacggaagatgcagcttcgggagttggctcgcttaaatgggacccttcgggaagacgataacaggatcttaagaccctggcagagctcagagacccgcagcattaccaacaccacagtgtgtaccaagtgtggaggggctggccacattgcttcagactgtaaattccaaaggcctggtgatcctcagtcagctcaggataaagcacggatggataaagaatatttgtccctcatggctgaactgggtgaagcacctgtcccagcatctgtgggctccacctctgggcctgccaccacacccctggccagcgcacctcgtcctgctgctcccgccaacaacccacctccaccgtctctcatgtctaccacccagagccgcccaccctggatgaattctggcccttcagagagtcggccctaccacggcatgcatggaggtggtcctggtgggcccggaggtggcccccacagcttcccacacccattacccagcctgacaggtgggcatggtggacatcccatgcagcacaaccccaatggacccccacccccttggatgcagccaccaccaccaccgatgaaccagggcccccaccctcctgggcaccatggccctcctccaatggatcagtacctgggaagtacgcctgtgggctctggggtctatcgcctgcatcaaggaaaaggtatgatgccgccaccacctatgggcatgatgccgccgccgccgccgcctcccagtgggcagcccccaccccctccctctggtcctcttcccccatggcaacaacagcagcagcagcctccgccaccccctccgcccagcagcagtatggcttccagtacccccttgccatggcagcaaaatacgacgactaccaccacgagcgctggcacagggtccatcccgccatggcaacagcagcaggcggctgccgcagcttctccaggagcccctcagatgcaaggcaaccccactatggtgcccctgccccccggggtccagccgcctctgccgcctggggcccctccccctccgccgcctccaccgcctggttccgccggcatgatgatccctccccgcggcggcgatggcccgagccatgagagtgaggactttccgcgcccattggtgacccttccaggcagacagcctcagcaacgcccctggtggacaggatggttcggcaaagcagcctgagttatttttgtggacggaatcggaacacgctggctccatatcgtgaaatttttattaatttttttctttttcctttgttacttcttt

SEQ ID NO: 1387 - DNA, 1340 bp, Homo sapiens; identical to SEQ ID NO: 994

SEQ ID NO: 1388 - DNA, 3128 bp, Homo sapiens; identical to SEQ ID NO: 996

SEQ ID NO: 1389 - DNA, 1743 bp, Homo sapiens
ctgaaggcggaaccacgacgggcagagagcacggagccgggaagcccctgggcgcccgtcggagggctatggagcagcggccgcggggctgcgcggcggtggcggcggcgctcctcctggtgctgctgggggcccgggcccagggcggcactcgtagccccaggtgtgactgtgccggtgacttccacaagaagattggtctgttttgttgcagaggctgcccagcggggcactacctgaaggccccttgcacggagccctgcggcaactccacctgccttgtgtgtccccaagacaccttcttggcctgggagaaccaccataattctgaatgtgcccgctgccaggcctgtgatgagcaggcctcccaggtggcgctggagaactgttcagcagtggccgacacccgctgtggctgtaagccaggctggtttgtggagtgccaggtcagccaatgtgtcagcagttcacccttctactgccaaccatgcctagactgcggggccctgcaccgccacacacggctactctgttcccgcagagatactgactgtgggacctgcctgcctggcttctatgaacatggcgatggctgcgtgtcctgccccacgagcaccctggggagctgtccagagcgctgtgccgctgtctgtggctggaggcagagtaggtggtgtgctgggaatgcgcgtgggagaactgggatggaccgaggggaggcgggtgaggaggggggcaaccacccaacacccaccagctgctttcagtgttctgggtccaggtgctcctggctggccttgtggtccccctcctgcttggggccaccctgacctacacataccgccactgctggcctcacaagcccctggttactgcagatgaagctgggatggaggctctgaccccaccaccggccacccatctgtcacccttggacagcgcccacacccttctagcacctcctgacagcagtgagaagatctgcaccgtccagttggtgggtaacagctggacccctggctaccccgagacccaggaggcgctctgcccgcaggtgacatggtcctgggaccagttgcccagcagagctcttggccccgctcgtgcgcccacactctcgccagagtccccagccggctcgccagccatgatgctgcagccgggcccgcagctctacgacgtgatggacgcggtcccagcgcggcgctggaaggagttcgtgcgcacgctggggctgcgcgaggcagagatcgaagccgtggaggtggagatcggtctcttccgagaccagcagtacgagatgctcaagcactggcgccagcagcagcccgcgggcctcggagccgtttacgcggccctggagcgcatggggctggacggctgcgtggaagacttgcgcagccgcctgcagcgtggcccgtgacacgcagcccacttgccacctaggcgctctggtggcccttgcagaagccctaagtacggttacttatgcgtgtagacattttatgtcacttattaagccgctggcacggccctgcgtaggcacaccagccggccccacccctgctcgcccctatcgctccagccaaggcgaagaagcacgaacgaatgtcgagagggggtgaagacatttctcaacttctcggccggagtttggctgagatcgcggtattaaatctgtgaaagaaataaagaaaaaaacaaaacaaaacaaaaaaaaaaaaaaaaaaaaaaaaaaaaaaa

SEQ ID NO: 1390 - DNA, 3833 bp, Homo sapiens
gtgaattccgcaccatctctctcctgcctgtggggtttctgtcaactagtcgtggagggaaggagactctttaaagaataacatcttattgtggccatgccagaacccactaagaaagaggaaaatgaagtgccagccccagccccacccccggaagaaccaagtaaagagaaggaggccggaactacaccagcaaaagactggacccttgtcgaaactcctcctggggaggaacaagccaagcagaatgccaactcccagctgtccatcttgttcattgaaaaacctcaaggaggaacagtgaaagttggtgaagatatcaccttcatagccaaagtcaaggctgaagatctttctgagaaacccactatcaatggttcaaggaaatggatggacctggccagcaaagccgggaagcaccttcagctgaaggaaacctttgagaggcacagtcgggtgtacacatttgagatgcagatcatcaaggccaaagataactttgcaggaaattacagatgcgaggtcacctataaggataagtttgacagctgttcatttgatcttgaagtgcacgaatctactgggactactccaaacattgacatcagatctgctttcaagagaagtggagaaggtcaagaggatgcaggagaacttgactttagtggtctcctgaaacgtagggaggtgaagcagcaggaggaagaaccccaggtggacgtatgggagttgctgaagaacaccaaacccagtgagtacgagaagatcgccttccagtatgaatcaccgacctgcagcggcatgctgaagcgactcaagcgcagcatcagagaggagaagaagagcgccgcttttgcaaaaattcttgatcctgtatatcaggttgacaaaggaggcagagtgaggtttgttgtggagctggcagatccaaagttggaggtgaaatggaataaaaatggtcaagaacttcgacccagtaccaaatacatctttgaagacacaagatgccagagcatcctgaatatcgataactgtcagatgacagatgattcagagtattatgtgacagccggtgatgagaaatgttctactgagctcttagtaagagagcctccaattatggtgaccaaacagctggaagatacaactgattattgtggggagagagtggaattagaatgtgaggtgtctgaagatgatgcccaagtaaaatggtttaagaatggtgaagagattatcctggtccaaacaagataccgaattagagttgagggtaaaaaacacatcttgatcatagagggagcaacaaaggctgatgctgcagattattcagtaatgacaacaggaggacaatcatctgctaaacttagtgttgacttgaaacctctgaagattttgacacctctgactgatcagactgtaaatcttggaaaagaaatctgcctgaagtgtgaaatctctgaaaacataccaggaaaatggactaaaaatggcctacctgttcaggagagtgaccgtctaaaggtggttcacaagggaaggatccacaagttagtgatagatcatgccctcactgaagatgaaggtgattatgtatttgcacctgatgcctacaatgttactctgcctgccaaagttcatgttattgatcctcctaagatcatcctggatggtcttgatgctgacaacacagtgacagtgattgcaggaaacaagcttcgtcttgagatccccatcagcggagaaccacctcctaaagccatgtggagccggggagataaggctattatggaaggcagtggccggataagaacagaatcttaccctgatagcagcactctggtcattgatatagctgaaagagatgactctggtgtttaccacatcaatctgaaaaacgaagctggagaggcacatgcaagcatcaaggttaaagttgtggacttccctgatcctccagtggcaccgactgtgacagaggtgggagatgactggtgtatcatgaactgggagcctcctgcctacgacggaggctctccaatcctaggatattttattgagaggaagaagaaacaaagctccaggtggatgaggctgaattttgatctctgcaaagaaacaacttttgagcccaagaagatgattgaaggtgtggcctatgaggtccgcatctttgcagtcaatgccattggcatctccaagcccagtatgccctccaggccttttgttcctttggccgtaacaagccctcctactcttctgactgtggactctgtcactgacacgactgtcacgatgaggtggcgccccccagaccacattggtgcagcaggtttagatggctatgtgctagagtattgctttgaaggaagtacatcagcaaaacagtctgatgaaaatggggaggctgcctatgatctgccagctgaggactggatagttgcaaacaaagatctgattgacaagacgaagttcaccatcacaggtctgccaacagatgcaaagatctttgtgcgtgtgaaggctgttaatgcagctggtgccagcgagcccaagtactattctcagcccattctcgtgaaggaaatcatagaacctccaaagatacacagtcccaagcacctgaagcaaacatatatccgccgagtaggagaccgtgtcattcttgttatccctttccagggaaaaccaagaccagaattaacttggaagaaggatggtgcagaaattgataagaatcaaataaacattcgcaactctgagactgatacaatcatatttattagaaaagcagagaggagccactctgggaaatatgatctgcaagtcaaagtggacaaattcgtggagaccgcatcaattgacatcagaatcattgaccgtccaggtccaccccaaattgtgaagattgaggatgtctgggggagaaatgtcgctctcacatggactccaccaaaggatgatggaaatgctgctatcacaggctataccattcagaaggctgacaagaagagcatggaatggttacgtgtcattgagcatatcatcgaaccagtgccacatactgaattggtcatagggaatgaatattacttccgggtcttttctgaaaacatgtgtggcctcagtgaggatgccaccatgactaaagagagtgcagtgatcgccagggatggtaaaatctacaaaaatccagtgtatgaagactttgatttctcagaggcacccatgtttactcagcctttggttaaccgcctatgccatagcggttacatggccaccctaaactgcagtgtgagaggaaatcctaagcctaaaataacctggatgaaaaacaaagttgctattgtggatgatccaagatacaggatgttcagcaacctgggagtctgtaccctggaaattggcaagcccagcccttatgatggaggcacttactgctgcaaagcagtcaatgaccttgggacagtggagattgaatgcaaactggaggtgaaagtcattgcacaataaggatttttggaatgtataatatcatctaaggtgggctctccttctgcagactcctcttgcaaggcgtacctccaaacataattgattgctatctgcgagacttacactcaagcaatcctgaggaatactgagggagggcctggctactgtctctctgcactctgctgctttgaaatctggttgaaatgagaaaaagcattttctgttttcccaccaggcccccaagtgtggtctttttctttcctcctaatgttgaagagaaaaaaaaaaaaaaaaaagtttgcccagattgcttaattaaaaattgcaaacaaaatctc

SEQ ID NO: 1391 - DNA, 1443 bp, Homo sapiens; identical to SEQ ID NO: 999

SEQ ID NO: 1392 - DNA, 1309 bp, Homo sapiens; identical to SEQ ID NO: 1000
  misc_feature (1)...(1309): n=a,t,g or c

What is claimed is:

1. A process for identifying an agent that modulates the activity of a cancer-related gene comprising:
(a) contacting a compound with a cell containing a gene that corresponds to a polynucleotide having a sequence selected from the group consisting of SEQ ID NO: 1-1392 and under conditions promoting the expression of said gene; and
(b) detecting a difference in expression of said gene relative to when said compound is not present
thereby identifying an agent that modulates the activity of a cancer-related gene.

2. The process of claim 1 wherein said gene has a sequence selected from the group consisting of SEQ ID NO: 1-1392.

3. The process of claim 1 wherein the cell is a cancer cell, the sequence is selected from SEQ ID NO: 1-597 and the difference in expression is a decrease in expression.

4. The process of claim 2 wherein the cell is a cancer cell, the sequence is selected from SEQ ID NO: 1-597 and the difference in expression is a decrease in expression.

5. The process of claim 3 or 4 wherein the cancer is breast cancer.

6. The process of claim 5 wherein the cell is an infiltrating ductal carcinoma cell and the sequence is selected from SEQ ID NO: 1-188.

7. The process of claim 5 wherein the cell is a carcinoma cell and the sequence is selected from SEQ ID NO: 189-392.

8. The process of claim 5 wherein the cell is an infiltrating lobular carcinoma cell and the sequence is selected from SEQ ID NO: 393-597.

9. The process of claim 1 wherein the cell is a non-cancerous cell, the sequence is selected from SEQ ID NO: 598-1392 and the difference in expression is an increase in expression.

10. The process of claim 2 wherein the cell is a non-cancerous cell, the sequence is selected from SEQ ID NO: 598-1392 and the difference in expression is a decrease in expression.

11. The process of claim 1-10 wherein expression is determined for more than one said gene.

12. The process of claim 1-10 wherein expression is determined for at least 5 said genes.

13. The process of claim 1-10 wherein expression is determined for at least 10 said genes.

14. The process of claim 1-10 wherein expression is determined for all said genes of step (a).

15. A process for identifying an anti-neoplastic agent comprising contacting a cell exhibiting neoplastic activity with a compound first identified as a cancer-related gene modulator using a process of one of claims 1-14 and detecting a decrease in said neoplastic activity after said contacting compared to when said contacting does not occur.

16. The process of claim 15 wherein said neoplastic activity is accelerated replication.

17. The process of claim 15 wherein said decrease in neoplastic activity results from the death of the cell.

18. A process for identifying an anti-neoplastic agent comprising administering to an animal exhibiting a cancerous condition an effective amount of an agent first identified according to a process of one of claims 1-17 and detecting a decrease in said cancerous condition.

19. A process for determining the cancerous status of a cell, comprising determining the level of expression in said cell of at least one gene that corresponds to a polynucleotide having a sequence selected from the group consisting of SEQ ID NO: 1-1392 wherein an elevated expression relative to a known non-cancerous cell when the sequence is one of SEQ ID NO: 1-597 or a reduced expression relative to a known non-cancerous cell when the sequence is one of SEQ ID NO: 598-1392 indicates a cancerous state or potentially cancerous state.

20. The process of claim 19 wherein said RNAs are identical.

21. The process of claim 19 or 20 wherein said expression is the expression of more than one said gene.

22. The process of claim 19 or 20 wherein said expression is the expression of at least 5 said genes.

23. The process of claim 19 or 20 wherein said expression is the expression of at least 10 said genes.

24. The process of claim 19 or 20 wherein said expression is the expression of all said genes.

25. A process for determining if a test gene is a cancer initiating or facilitating gene comprising contacting a cell expressing said test gene with an agent that decreases the expression of a gene that corresponds to a polynucleotide having a sequence selected from the group consisting of SEQ ID NO: 1-597 and detecting a decrease in expression of the test gene compared to when said agent is not present, thereby identifying said test gene as being a cancer initiating or facilitating gene.

26. The process of claim 25 wherein the gene determined by said process is an oncogene.

27. The process of claim 25 wherein the gene determined by said process is a cancer facilitating gene.

28. The process of claim 25 wherein said decrease in expression is due to a decrease in copy number of said gene in said cell or a cell derived from said cell.

29. A process for determining if a test gene is a cancer suppressor gene comprising contacting a cell expressing said test gene with an agent that increases the expression of a gene that corresponds to a polynucleotide having a sequence selected from the group consisting of SEQ ID NO: 598-1392 and detecting an increase in expression of said test gene compared to when said agent is not present, thereby identifying said test gene as being a cancer suppressor gene.

30. The process of claim 29 wherein said increase in expression is due to an increase in copy number of said gene in said cell or a cell derived from said cell.

31. A process for treating cancer comprising contacting a cancerous cell with an agent having activity against an expression product encoded by a gene sequence selected from the group consisting of SEQ ID NO: 1-597

32. The process of claim 31 wherein said cancerous cell is contacted in vivo.

33. The process of claim 31 wherein said agent has affinity for said expression product.

34. The process of claim 33 wherein said agent is an antibody.

35. The process of claim 31 wherein said agent is an apoptosis-inducing agent.

36. A method for producing a product comprising identifying an agent according to the process of claim 1 -18 wherein said product is the data collected with respect to said agent as a result of said process and wherein said data is sufficient to convey the chemical structure and/or properties of said agent.

37. A process for treating a cancerous condition in an animal afflicted therewith comprising administering to said animal a therapeutically effective amount of an agent first identified as having anti-neoplastic activity using the process of claim 18.

38. A process for protecting an animal against cancer comprising administering to an animal at risk of developing cancer a therapeutically effective amount of an agent first identified as having anti-neoplastic activity using the process of claim 18.

39. The process of claim 37 or 38 wherein said cancer is breast cancer.

40. The process of claim 39 wherein said breast cancer is a carcinoma.

41. The process of claim 40 wherein said carcinoma is infiltrating ductal carcinoma.

42. The process of claim 40 wherein said carcinoma is infiltrating lobular carcinoma.

43. A process for determining functionally related genes comprising contacting one or more gene sequences selected from the group consisting of the sequences of SEQ ID NO: 1-1392 with an agent that modulates expression of more than one gene in such group and thereby determining a subset of genes of said group.

44. The process of claim 43 wherein said functionally related genes are genes modulating the same metabolic pathway.

45. The process of claim 43 wherein said genes are genes encoding functionally related polypeptides.

46. The process of claim 43 wherein said all of genes are genes whose expression is modulated by the same transcription activator or enhancer sequence.
